United States Patent Application Publication US 2025/0122569 A1 - sequence listing, part 8

SEQ ID NO: 1108 - DNA, 31294 bp, unidentified
  source 1..31294: mol_type = unassigned DNA
  misc_difference 3129: note = a, c, g, or t
  misc_difference 3130: note = a, c, g, or t
  misc_difference 3131: note = a, c, g, or t
  misc_difference 3132: note = a, c, g, or t
  misc_difference 3133: note = a, c, g, or t
  misc_difference 3134: note = a, c, g, or t
  misc_difference 3135: note = a, c, g, or t
  misc_difference 3136: note = a, c, g, or t
  misc_difference 3137: note = a, c, g, or t
  misc_difference 3138: note = a, c, g, or t
  misc_difference 3139: note = a, c, g, or t
  misc_difference 3140: note = a, c, g, or t
  misc_difference 3141: note = a, c, g, or t
  misc_difference 3142: note = a, c, g, or t
  misc_difference 3143: note = a, c, g, or t
  misc_difference 3144: note = a, c, g, or t
  misc_difference 3145: note = a, c, g, or t
  misc_difference 3146: note = a, c, g, or t
  misc_difference 3147: note = a, c, g, or t
  misc_difference 3148: note = a, c, g, or t
  misc_difference 3149: note = a, c, g, or t
  misc_difference 3150: note = a, c, g, or t
  misc_difference 3151: note = a, c, g, or t
  misc_difference 3152: note = a, c, g, or t
  misc_difference 3153: note = a, c, g, or t
  misc_difference 3154: note = a, c, g, or t
  misc_difference 3155: note = a, c, g, or t
  misc_difference 3156: note = a, c, g, or t
  misc_difference 3157: note = a, c, g, or t
  misc_difference 3158: note = a, c, g, or t
  misc_difference 3159: note = a, c, g, or t
  misc_difference 3160: note = a, c, g, or t
  misc_difference 3161: note = a, c, g, or t
  misc_difference 3162: note = a, c, g, or t
  misc_difference 3163: note = a, c, g, or t
  misc_difference 3164: note = a, c, g, or t
  misc_difference 3165: note = a, c, g, or t
  misc_difference 3166: note = a, c, g, or t
  misc_difference 3167: note = a, c, g, or t
  misc_difference 3168: note = a, c, g, or t
  misc_difference 3169: note = a, c, g, or t
  misc_difference 3170: note = a, c, g, or t
  misc_difference 3171: note = a, c, g, or t
  misc_difference 3172: note = a, c, g, or t
  misc_difference 3173: note = a, c, g, or t
  misc_difference 3174: note = a, c, g, or t
  misc_difference 3175: note = a, c, g, or t
  misc_difference 3176: note = a, c, g, or t
  misc_difference 3177: note = a, c, g, or t
  misc_difference 3178: note = a, c, g, or t
  misc_difference 3179: note = a, c, g, or t
  misc_difference 3180: note = a, c, g, or t
  misc_difference 3181: note = a, c, g, or t
  misc_difference 3182: note = a, c, g, or t
  misc_difference 3183: note = a, c, g, or t
  misc_difference 3184: note = a, c, g, or t
  misc_difference 3185: note = a, c, g, or t
  misc_difference 3186: note = a, c, g, or t
  misc_difference 3187: note = a, c, g, or t
  misc_difference 3188: note = a, c, g, or t
  misc_difference 3189: note = a, c, g, or t
  misc_difference 3190: note = a, c, g, or t
  misc_difference 3191: note = a, c, g, or t
  misc_difference 3192: note = a, c, g, or t
  misc_difference 3193: note = a, c, g, or t
  misc_difference 3194: note = a, c, g, or t
  misc_difference 3195: note = a, c, g, or t
  misc_difference 3196: note = a, c, g, or t
  misc_difference 3197: note = a, c, g, or t
  misc_difference 3198: note = a, c, g, or t
  misc_difference 3199: note = a, c, g, or t
  misc_difference 3200: note = a, c, g, or t
  misc_difference 3201: note = a, c, g, or t
  misc_difference 3202: note = a, c, g, or t
  misc_difference 3203: note = a, c, g, or t
  misc_difference 3204: note = a, c, g, or t
  misc_difference 3205: note = a, c, g, or t
  misc_difference 3206: note = a, c, g, or t
  misc_difference 3207: note = a, c, g, or t
  misc_difference 3208: note = a, c, g, or t
  misc_difference 3209: note = a, c, g, or t
  misc_difference 3210: note = a, c, g, or t
  misc_difference 3211: note = a, c, g, or t
  misc_difference 3212: note = a, c, g, or t
  misc_difference 3213: note = a, c, g, or t
  misc_difference 3214: note = a, c, g, or t
  misc_difference 3215: note = a, c, g, or t
  misc_difference 3216: note = a, c, g, or t
  misc_difference 3217: note = a, c, g, or t
  misc_difference 3218: note = a, c, g, or t
  misc_difference 3219: note = a, c, g, or t
  misc_difference 3220: note = a, c, g, or t
  misc_difference 3221: note = a, c, g, or t
  misc_difference 3222: note = a, c, g, or t
  misc_difference 3223: note = a, c, g, or t
  misc_difference 3224: note = a, c, g, or t
  misc_difference 3225: note = a, c, g, or t
  misc_difference 3226: note = a, c, g, or t
  misc_difference 3227: note = a, c, g, or t
  misc_difference 3228: note = a, c, g, or t
atgaaaaaattatttaaccatacaaaacgtccggaccgtaactgggaagaagacgtacaggatggttacgattgggatgaggaagaatataccggagaagacgacggcgaggaatactatgccgatgaggaagagtacaccggagaagaagacggcgaagagtactatgctgatgaggaagagtacaccggagaagaagacggcgaagagtactatgctgatgaggaagagtacaccggagaagaagacggtgaggagtactacgccgatgaggaagagcacaccggagaagaagacggtgaggagtactatgctgatgaggaagagtacaccggagaagaagacggtgaggagtactacgccgatgaggaagagcacaccggagaagaagacggtgaggagtactatgccgatgaggaagagtacaccggagaagaagacggtgaggagtactatgccgatgacgtggagtacatcgaagagagtgacgatgaagagtattatgccgacgaggattacgaggaagagccggctcccacgggcaggagaaagaccgggggcaaaaagcagggcggaattgctgtaatctgggcaaaattcctgaacctgagtaccatggaccggatcatggcagctaccggagtggcggtactgattctggctatcgtgaccggaagtgtctatgccagtgcccgggcagtggatggacaggtatcggagttcgtcagcgtgggaacacagctggacggcatccagatgatcggtgagcagggacttctggcagtggcagacgcacagatggcaaagatcgcggcagccaatgcggtagaagaagatccggaagaacagaaggaatatgaagaggcagagtacaccaacggcggtacggtagaactggagctggtctctgtacagaaggatctgaagatcaaattcaacaataaaaagaccggcaagctgatctccaacgtacccttcagcgtaaccatcacagatcccaacggcaagaccgagacctggactgatgacgatatggacggtattatctataaaaagggtattacgccggggaattattccgtagcggtaaacgcactgacggatgataaatacaaggactatgttctgccgacagcagcacagaaagtagaagtaaagaaagatatcgcctataaaaaggtcgatgtctccaatgagatcaagaaagaatctgagatcaatgctgcaaaagaggatacacagatcaaggatactactgtagagtccacactgcaggatactgtgcagtgggtggcaagtaccgcgactgccaatacttataaagaagtatccaaggataccattaccgatccggagaccgtaacggtggcttacagcggtaagttcctgcggatggcagaagtgtctcctacagcagaaccaacagcggaacctacagcagaacctacaacagagcccacagcagaacctacaaaagaaccgacagtaaccccgactgcagagcccacagcgactccgacagtaaccccgacggcaacagcaaccccgacggcaacagcaaccccggcggcaacagcaaccccgacagcggcccctacggcaactcctacagcgactcctacggcaacccctacagcgactccggcggcgacaattactctggataaaacggcagtgacgacttatcagaaggcaacggatacagttaccgcaaatgtcagcggaagtggaaccgtaagtgcggcttccagcgataccggtatagcaactgtggctgtaagcggcaagaccattactatcaccggtgtgaaagcgggaagtgctacggtaacggtaacgtatacagaaggcagcaacaaggtggaagccaagtgcacagtaacagtaaaggcttccaatgcgagagaagataaaactaccaggctgaaagacaagagcggtgtacagctgtatgtacaggatggtgacagctatcgtgaagcagtcaatgcggattactttactgcctctaagttctttatcaaaggtgatgtgaaatacaccggatggcagacactggacggaaagctttatttctttacagcggatggcaacaaggttaccggagaacaggtcattcagggcgcaaaatacaattttgccagtgacggatctctggtagttggttccggcaccatgggaatcgatgtgtccaagtggaatggaaaaattgactggaacgccgtgaagaattccggtgtcagctacgtgatcatccgtgtgggttatcgcggttcctctcagggagcactgatcgatgaccctaccttcaagaccaacatcaagggagctacggcagcagggctgaaagtgggtgtatacttctttacccaggcagtggatgaggtcgaggcagtacaggaagcctccatggtactggaccgtatcagcggttacaagatttcctatccggtattcctggatgtggaaggaagcggcggaagaggtgataagatcgattccgctaccagaacggcagtatgtaaggcattctgcaataccattcagaatgcaggatacaccgcaggtgtgtatgccaacaagacctggctcagccagaagatggatgcaagtgcactgagtggttacaagatctggctggcccagtatgcagcagcacccacctacaccggacgctatgatctgtggcaatacaaatccacaggaaaagtcagcggcatcagcggcaatgtggatctgaacctcagctacctgggatattaagatttgcaataaagcccagaccgactgcttgcaggcgaggctgggactttattagcaaatcaaacacacatgagcatgtaggacgatagtccggaatgcgaatgggtgtcacgggtccgagagcacgaagtgcggaggagccgtgttaatacccggcgctaagaatgacgatagtccggaatgcgaatgtgtgtcacgggtccgagagcacgaagtggggaggagccgtgttaatacccagcgctaagaatgccgatagtccggaatgcgaatgtgtgtcacggatccgagagcacgaagtgcggaggagccgtgttgatatcctgcttgttttatggtaaaatatccctatctataacaaaaaannnnnnnnnnnnnnnnnnnnnnnnnnnnnnnnnnnnnnnnnnnnnnnnnnnnnnnnnnnnnnnnnnnnnnnnnnnnnnnnnnnnnnnnnnnnnnnnnnnnccgtgttgatatcctgcttgttttatggtaaaatatccctatctataacaaaaaatgtgcgctgaacgcagaacggagaaaaaatgagaacttatctggtaacaggaggggccggttttatcggttccaactatattcattacatgtttaaaaaatacgataataaaatccgtatcatcaacgtggatgcactgacctatgcaggcaatcttgagaatctcaaggacgtggagaagcgtgagaactacacctttgtaaaggctaatatctgtgacaaggatgccatcagcaaaattttcacagagaatgatatcgaccgtgtggtacattttgcggcagaaagccatgtagacagaagtatccgcaacccggagatcttcgtacagaccaatgtcctgggtactgcagtgatgctgaactgtgccaaggcagcctgggagcttcccgatggcagcttcaaagaaggcaagaagttcctgcatgtatctacagatgaggtctacggatctcttcccgatgatgacaatgcattcttctatgagaccactccgtatgatccccacagcccttactccgcaagtaaggcaagctcggacatgttggtgaaggcatatatggatacctatcatttccctgccaacattaccaactgctccaacaattacggccctttccagttccctgagaagctgatccctctgatcatcaataatgcattgcatggcaaaaagcttccggtctacggtgacggtaagaacgtccgtgactggctgtatgtggaagaccatgctaaggctatcgatatggtacaggaacagggaagactgttcgaaacctacaatgtgggcggacataatgagaagcagaatatcgagatcatccacattatcattgagactctgcaggagatgcttccggattccgatccccgcaaggcacatattaacaacgacctgatcacttacgtggaggatcgtaagggacatgacagaagatatgccattgcaccggacaagatcaaggcagagatcggctggtatcccgagaccatgttcaaggaaggcatccgcaagaccatcgcctggtacttcgagcatgaagactggatgaataatgtgaccagcggtgattaccagaagtactacaatgagatgtacgaagaaaagtaaagaatacctgttaaatgggaacgatgaacgtcgttcccattcggtgtgttaaaaaacaagtaaaaagaagcccgaaaagggcggatcggaggacgaaatgaaaggaattatactggcgggaggttccggaaccagactgtatcccctgacaaaagcgatttccaagcagatcatgccggtgtacgataaacccatgatctattatcccctgtcaacactgatgctggcagatatcagagaggtattgatcatctccaccccaagagaccttccggtatttcaggaattgctgggagacggcagccagctgggcatgcgcctggaatatgcggtgcaggatcagccccgcgggctggcagatgcctttatcatcggtgcggatttcatcggtaatgacagagtggcactggtactgggagataatattttctacggacagagcttttccgcagtattgcgcagagtagctgccagagaaaagggcgcaactattttcggctattatgtgcgtgatcccagagaatacggtgtggtggaatttgatgagaacggcaaggcactttccatcgaggagaagccggagcatcccaagagcaattatgcggttcccggactgtatttctatgacaatgctgtagtggagatcgcaaagaatgtaaaaccctctgcaagaggagagatagagatcaccagcatcaacaacgagtacctgaacagaggcagtttacaggtagagacactgggaagaggctttgcatggctggataccggcaatcatgatgcccttctggatgcggcagattttgtggcggctttccagaagagacagggtctgtacatttcctgtattgaagagatcgctttcaagcgaggattcattgacaaagagcagctgcttgctctggcagagccgctgcttaagacgaactacggaaaatatctggtagaggtagcaaatggactctaagctgcggaaaatggcgattctggcctccatggcggtgatcctgctggtggcactactggtcatgtatgtcaacagggagcagtttacggcagcttccggaccgccggcatccggcactcagaatgccggagcgggtgacagtgcatctctggcggaaaatggcgatcaggcagaagagacggtctcaccggatggtcagatcggcaatgatctgaaggcatttttaaaagataatacgttttttgatcaggaagtaaatccaattctggaagctgcaaaggataacagcaaccgtctgtctctggtagccacctccatagaaaaggatctgcggatccagatcgtggacaacgaaggaagtccggtgaccggggagagcttctacgtacggctggatggcctgggtgattacaaggatctggatcaggacggtatcatttacattggagatctggattccggagactattatattgagctccttcccattgagggatataaggttccggtcagtgagacaagagttcacgtcaaggataaagtggagtatctggccattgacgatatttccctgttgatcaagacggaggatgaagtggatgcagaagccgaggacagcgccgtggcagatgctctggcagatgcggacaagacagagatccagaagctgcagaccacgtccggtaatgcaaaggtcggtatcgatgtctccaaatggaaccaggagatcgactgggataaggtggaaaatgcaggagtgcagtttgccattatccgtgccggataccgcggttcggtaaccggaagcctggtggaagatcccatgttcgtgacgaacatgaagggtgcacaggccgcaggaattccggtgggcgtatactttttcacccaggctgtggatgagaaggaagctgtggaagaggcttccgcggtgatcgaactgatccgggattaccggctgaactatccggtatttatcgataccgaaggtgcgggcggtaacggccgtgcggacagtctggatgcggagaccagaacactggtatgtgaagcgttctgcaggaccatagaaaatgccggatacacggcgggtgtctatgccagccgtaactggtacaacaataatctgcagacagcaagactggaaaactatcatatctggctggcagagtatcgcagtgttccgttatatcagggatattataagacctggcagtatacctccaagggaaaagtggacggcatcgaaggtcgtgtggacatgaatatcacctacgaatagtcaataaaaataaagagtgaggacgaaataaatgggtaaaataacagtagaaacctgtgaaattgaaggattaaagatcattactcctacggtattcggagatgccagaggatattttatggagacttacaattataacgatttcaaggctgcgggaattcctgaggtgttcgtacaggacaatcagtccgcttccaagaagggtgtattgcgtggactgcatttccagaaacattttcctcaggacaagctggtgcgcgtgatccgcggagaagtctatgacgtggcagtggatctgcgggaaggttccaggactttcggccagtggtacggagtgcttttgtctgaagagaacaagaagcagttctttatcccgaagaattttgcacatggttttctggtactgtcggattatgcggaattctgctataaatgtacggatttctatcatcccgatgatgagggcggtatcgcttacaacacaccggatatcggtgtgaaatggccgattccagaaggcatggaactgacgctttccgagaaggataccaagtggggcacattggaacagtacgtgaaggaaaaagagaatgaaggtaagtaaaaaagcgggcattgccctgtttgtgacaacggcagtgatcatggcagtacttattgtattccataagaatccgggacctgcggcggatccgggacaggaactggccaagaagatcatttcctgcgtagtgatcgcggcggcatgcgttgcttttattcactggtatgataaattcaccggactgccggtggaactgttccagaaccgtcatctgatctggaaactggccaaaaatgatttcaaaaaaagatatgcgggatcttatctgggtgcggtatgggctatggcacagccggtggtcacggtggctatgtattacattgtttttgataagatcatgggtaatacgagtactcccctgcgggagggtgtggaagtaccctttgtattgttcctgacggctgggcttgtaccctggttctattttagtgaggcattaaacaatggaaccaatgcgctgctggaatataactatctggtgaaaaaagtagtatttaagatcagtatcctgcctatcatcaagattattgcagccacctttattcatgtattttttgtgtgtctgctgttgattgtggcagcaatttacgggtattatcctaccatatatacgatacagatcgtatactatagcttctgcctgttcatttttgtactggcactcagctatacgacttgtgcagtagtagtatttttccgggatctgtctcagatcatcagtatcggattgcagatcggcatgtgggccactcctattttgtggaatctggattccctgtccggcaattggatcacgattctgaagctgaatccgctggtgtatattgtaaacggttatcgaagtgctatttatgagaaggaatggtttttccaggatttcttttccaccatgtatttctggatcgtaacggtagtactgttcgggttgggagccgttattttcaaacgattgaaggtacatttcgcagacgtgctataatacgaatgattgttacgatttcgagagttcgaagaacggagaaatcgtattataaaaaacagagcatagcaaaacttttatagatgaagaaccttgtggggaggagctgcattacaaaactgttgtggggaaaacagaaagggtgaaagtaattgaagggtgctcgtgaaaaatttagaaaattttggttatggaagccgggaaagatcctgctggccgtgggatgctgcggactgctgctgttgacgctgattccattgtttcgtctgacagtctatgcggttccgtattatgatgattacaatttcggaagatttgccagagctgccatggagcaggaacagtcaaaatgggctgccatctccggtgcactggattgctccagaacgcagtggtatgcgtggcagggaacctattcttctattttctttatggcattgatgccggcaatctggggagaacagtattatttcctcggtccagtgttcatcctgctgctattgctggcgggtaccatgatatttacccatgtgatcctgcggaaagtactgggcatggaaaagtggaccggcctggcagcacaggcagtgattacagtggcagtctttatgtttatttattccgcacagagtggcttctactggtataacggcggagttcattacgtgggaatgcacggctttggattgttgatgttgtctgtggcaatctgcctggagagagcagaaggaagaactgctgccgggctgctatttacggcctcggtgctgctttccatgatcacggccggaagcaattttgtcacggcattgcagggacttttatcgctgttgacgattctgtttataagtgtggtagtggaacaccggaaaaagggactgtggctgttgcctgctacgctggtatacattataggatttgggctgaatgtagcggcaccgggcaattccgtgcgggcccgcagctatgtcggctggggatacagtcccctggagtccatcggcagatcttttctggaaggagtaaaacatcttccagagtttacgggatctattgttctgatggtaatggtgatgctgttacccctgatctggcaggcacttaaggagacggagtatcgtttccggtatccgggagtcgtacttctgtggtccttctgcctgtatgccaccggttacaccccaagcctgtattccctcggacatgccggattatccagaactctgaatgcggtgaagatcacatatttattgctgttgttcctgaacgaaatatactggtgtggctggctgcagcaaagactgcagaagaaggcatcaggcagcgcggcaagatggctggcgaactggaacggagccgcagtgtggtggttttatgcgattatgggtctggaatttatcatgatctttcaggtgtcacccaatcaggcaggacattattcggcttatggggcctattactatgtgcataccggagaagcgtataatttccatcaggaatatctggaacgggtggagaagctattgggagatgaggatgatgtacagctgcaaccttatcactacaagccctggtttttgtgcatgggagacctctcggaggatgaaaataacgaggccaaccgttctctggccatatggtatgacaaagacagtgtaacgctgataagcgaggattaaaattgatgcaggaaaagaaaaagctggccattgaagtcgataatgtccagaagatctataaactatatgataagccctcagatcggatgaaggaggctttcggcttcggaaaaaagacgaagcataagcttcactatgccctgaagggtgtggacatgaagatctatcagggagaaacggtgggtattatcggtaccaacggttccggtaaatccacgatcctgaagatcatcaccggtgtattgaatcccacttcgggaagagtgctggtaaatggccgtatttccgctctgctggagctgggtgccggattcaatatggaatataacggcattgaaaatgtgtatctgaacgggacgatgatgggattttccgagaaggagatcgaggcaaagcttccggagatcttaagttttgcggatatcggagattacgtctatcagccggtgaagacttattccagcggtatgttcgtccggctggcctttgcggtggccatcaatatcgagccggagatcctgatcgtggatgaggctctgagtgtcggtgacgtatttttccaggcaaaatgttatcataaattcgaagaattcaagaagatgggcaagaccattgtgttcgtcagtcatgatttgagcagtatcagcaaatattgtgaccgtgtatatctgctgaatcagggaaatatcctgggcgaaggcagtcccaaggctatgatcgacacctacaagagggtattggtgggacagtatgacggccaggagagtgtgggagaagagactgccagtctgctggatgatgaagacctgcagagagcagctgcccaaaaagcagatgagaaggggaccgatgcttcccaggcttccatggaggccaaggggcagaatcccaatgccctggaatacggtacgaagcaggcacagattgaggaattttacattacggatgacagaggggttcccaccaatgcgatcctgaagggcagtatgtttaccatccatatgcgggttcgttttatggatcatattccggcccccatttttgcattttctgtaaaaaacgtcatcggtgtggagatcaccggtacaaataccatgattgaaaaggcttttctggacagcgtggagccgggagaggtgaaaaatgtgacttttacccagaagatgaacttacagggtggtgagtatctgctgtctctgggagtgaccggctacaatcaggataccttcgaggtatatcacagactgtatgatgccttgaatattacggtggtatcggacaagaataccgtaggatattatgatatggattccgaaacaaaagtatgggatgcggaggagaagtaaggaatgacagagaccatcgggaagatcacactgaatctggataaatatcccggcgaggattattattgcgacggcagtgtggaggacgagatcttagacattgtaaaaaaatacagtacggtggaatatgacaggatcattgcggagcgaaagagctggccgatcctgtatcatttgtctgctctccgggaaaatatcgtggatttccttcccatacagaaaacagagaaagtgctggaagtgggcagtggatgcggagccatcacgggtgcactggcaagaaaagccggggaagtgacctgtgtggatctctcgaagaagcgcagcctgatcaacgcctgccgccacagcgaatgtgaaaatgtgacgatccatgtgggcaatttcacggatgtggaaccggaacttcccgcagactatgactatatctgtctgatcggtgtttttgagtacggacaggcttacataggcggcaagacgccttacgaggatttccttaagatcctacagaagcatctggcaccggacggcaggatcgtgattgccattgagaacaaatacggattgaaatattttgccggatgcaaggaagatcatctgggcagctggttttccggcattgaaaattatccggagggcggtgtggtacgcacgttttcccggaaaaagatggagcgcattttcgatgcctgcggtgtgagagaacgcagtttttattatccgtatcccgattataaatttatgaccacagtctattccgatgcttatcttccaggacgtggagagctgtccaacaatctgcggaattttgaccgggacagaatgctgttgttcgatgagaagagtgcttttgacggaattgtggaggaaggattgttttccgttttttccaattcctatatggcggtgatcggagcacctctggatctgaaatatgccagatattccaatgaccgtgcggaaagcttccggatccgcaccgagatcctgcgggacaaggaaggctgtaagacggtccgaaaatatccgctgacaaaagaagcggaagcccatgtgcgtcatatgccggaggcttatgaaaaattgaaggaacggtatgcgggaagcagtctggatgtcaatgtctgccatctgggagaagagaacggcataccttatgcggaatttgagttcgtgccgggcagaccgctgtcggaactgatggacgaatgcctggacagacaggatgtggagggatttcacaacctgtttgcagaatatctggagagagtgggctacggggaggatgtgccggtggcagactttgatctgatctttgccaatattctggtggatggtgaccactggacactgattgattatgaatggacttttgaccgtcccatagagaccagagctctggccttccgggctgtatactgttatgtactggaagatgaaagacgtaatgcactggaactggatcgtattctggatcgtctgggcatcacggaaaacgaagccagccagtacagagagcaggagatggaatttcagaaatatgtgaccggacagaaattgtccatgggtgagatccgcaatctcttaggcggcgaaatttataagcccacggaatggatcggacggttccgtcagacggagggagaactcagggtacagatctatgaggacaggggacagggattttccgaagaaaattcttatttcccggagaacgtctatgcagaggaaaaacaggcggaatttacggtgaatttcgatggaaatgtccattatttacggctggatccggccatgtgcgcctgcgtgtgtaaaatccgggagcttaccatgaacggacagccggttcctgtgcaggacaaaaagatcgttaccaccaatggaaaaatcttaaagtccgcagacggtgcggagcatcccagcgtggtatttcccacggaggatccgaatctgacgatccgggtggatgcattggacagaaaggcagagaacatcctgactgtgaaaatggagatcgtgcagattccccttgctgtggcaagtgacatggcgggagcggtgaaaaaatttttctaaggagacaggaaacttgagcattcggacgtcagtaaagcagatgcttgtcagacaacaggataaaaagtatgaagcagaactggcaaagctgcgggtgacctacgcgcaatgggctgcggagcaggaaaaaaagattgcggaaacagtggtcacagagatcggggaaagagccggtcttgcggaattcgtgatctacaggcagcagaacggacagctggcggaaaatgctgtggagcggatcaatgcgtattttgtgaagcatccggaggcagagatcgtctatggagatgaagatctgctgtcagagaacggagagcgtgtgatcccctggttcaagccttgctgggctccggatacctaccgggctttcttctatgtgggaagcgtcgtggcagtgcggagcagactgctgcagaaactgggggagcccggggttgtgacagaaggagagagcaccggcagggaaatagtattttcgaaagcggaagagatccgtcccctgatggaccggctgtttctggcggccggtggatttgagagaggctgtcataccattggacatctggaagaagtgctgtttcacggcacttttggtactgcgggaatcggactgcagggaccggcagaaaccagccgggagaaagcggaagatgagcagaacccctgggaagagtaccggacggcagcggaatccgcaaaactgtccgtggaactggcggccaaagcggcagaggaagccagagaactgttcgccagagagcttagggtctctgtgatcattccttccaaagataatccttccgtactgggaaaatgtctgcggtcgctgacgcaacgcccggagggcagtgttccggtggaaatcctgctgatagataatggaagtaacgaggaaaacaggaaaaaaacagaacagctggtggaagaaatccggacagccggaacaccgatccggtatgtatatgagcctgcggagttcaatttttccaccatgtgtaatcgtggcgcagaactggcagatggcaagctgttgctgttcttaaatgatgatattgaattatgtgagaatgactggctggataaaatggtgtccagagccttgcagccttatgtgggcagtgtgggactgaaactttattatccggattccgtgaagatccagcatgacggcattgtcaatctgccggtgggaccggtgcataagctacaatttatggaggatgacagaagctactattttggacggaaccgttttacacaggattgtgtggccgtgacgggagcctgtctcctgatccggacagaggtgttccgggaggccggaggattccgggaagtgttgcgggtagcctataatgatgtggaactgggcttccggcttctggaaatgggatactacaatgtggtgtggaacgaccgctttgcatatcaccatgaatctctcagccggggaagcgatgaaagtcctgagaaaatgcagcgtctggtacaggagagagaactgctctaccagatgcatccacagttccggggagaggatcctttttacccgaaggggctgaaccgggagggactggacagccgtgtggttccggcatatctgacagatcggaatgttttacaggagcctttctggaaaaggggacttcctggcggagaggaattacagaagatccgcagggataactgtctgatggccagagtagagacagcgggaccggaacggatccagggatatagtgtgattctgggggacgacaatgcctgctatgagaaatatctgttactgcttccggacggggaagcagaagagaagagtatccggtccatgaaattactgcctgcctaccggcaggaactggaggaaaatcttccggatcagaaaaatgtggcattgggcggcttttgtgtcctcagagaaggagaacaactgccggcgggaaactatacgatcgctgttcttgtggtgaatcgtgtcagcaagctgaaactttggaatactacgggaaaatatctgaccgtagagcttccggcagcaaaagaataaaacagatgcatgatccgctaaaatgcggtgaaagcatcacggaggagacatatgtcagagagcaacaccgagatcaattataaggaagcctacgagagagagcatgaaaaatgtgcggatctggcggacaagatcgtagtactggaatcggagaaggaagatctgcagttcaaactggaccggatcaagaaaaataaattctggaaggctacaggacctgccagaagtgtgatccattttgcccagagacagaaggaacggctgtctcattgcggcggtcccaaagatattctgcggaagatccgtaacaagagtcaccagaagagcctgatggaatcctacggtaccggaagctttcccgatgcggagcagaggaagaaagaggaagaaacggtattcccctatatgccgaagatcagtattctcgtgccgttgtggaataacaagagagagttccagatacagatgctggactgcgtcatgaaccagacctatcagaactgggaactgtgtctggcggacggttccgatgcggaacatgcttacatcgaagaactctgcaaggagtacgcggcgaaatcagatggccgtattgtatataagcacctggaccataacggaggtatttcctacaacaccaatgagtgttacaagctggccaccggagactatatcggactgttcgatcaggatgacattctgcatccttccgtattgtatgcctatgtcaaggaaatcaatgaacagggtgcggattatctgtactgtgatgagaccaccttccaggaggacaatattaataaaatgctgaccatgcattttaagccggattatgcaccggataatctgcgggccaacaattatatctgtcatttcagcgtcttttccagaaaacttctggaaggcgaggaactgttccgtacggcttttgacggtgcgcaggaccacgatatgatcctgcgtctgacggacagagcacaaaagatcgtacatgtgcccagactgatgtattactggagaagccatgcgggcagtaccgccgccagtattgacgcaaagccctatgccatcgaggcggcaaagggtgccgtggcggatcatctgaaaaagcatggattcaaacattttcagatcaccagtaccagagcctgtgccacaattttccggatccgctatcagattctgggagatccgaagatctccatcgtgatcgccaacaaggatcacgtggaagatctgaagagatgtattacttctattcagaagaacagcacctggagcaactacgagatcatcgtggtggagaacaacagcaccacaccggaaatccgggattactattcccagctgctgggattgtccggcaatgattcctacgcagagagatgcaagctgcataccgtctgcggtcatgacggcgggattctgcacagcgaggacggccggatctctgtggtgacccatcatggtgactttaattattctgctgtaaataatctgggagtatcctatgccaccggagattatatccttttgctgaacaatgatacggaagtgatcactgccaactggatggaagagatgctgatgtatgcacagcgggaagatgtgggtgccgtaggtgcaaagctgtattatgcggacaagacgatccagcatgccggtgtagtcatcggactgggggcacatcgcaccgcaggacatacccattatcgtattccggtacagaacctcggctacatgggacgcctgtgttatacccagaatgccacggcagtgaccggagcatgtctgttggtgaaaaagagtctgtatgagcaggtgggaggactggacgagagctttgtgatctctctgaatgacgtggatttctgcctgaaactgcgcaaactgggactgctgaatgtatggaccccttttgcggaactgtatcattatgaatctatttccagaggtctggatgatcagggagagaaggcggagcgttacaacaaagaatccgagcatttccgtgaaaaatggaaggcagagctggaagcaggagacccctattacaacccgaatttctctctggatcgcagtgactatgcgctgagagatccggttagcggacgttaaattgctcttttcagtaaaggtaatctatggtagaataatggcggagagcgtttactgaagaaggataaagatagcgataaaacaggaggataggaaaatgagttatatggacgaactgaatttctggttgaatgatgattattttgaccagaagaccaaagatgaacttctggcaatccgcaacaacgaggcagaagtggaagatcgtttttacaaggaactggaattcggtaccggcggtttacgtggcgtgatcggtgcaggaaccaaccgcatgaacgtatataccgttcgtaaggcaactcagggtcttgctaattatatcattaagcgcggcacccagagcaagggtgtggctatcgcatttgactcccgccgcatgtctcccgagttttccgatgaggcagcaagatgtctggcagccaatggcatcaaggcatacatttttgaatctttaagacctaccccggaactgtcctttgcccttcgtacgctgggatgtaccgcaggtatcgtagtgactgcaagccacaaccctcctgagtacaacggctacaaagtatactgggaggacggcgcacaggtaaccgctcctattgataaggacatcatcaccgaagtacaggccatcaaggattatcataccgtgaagaccatgagcagagaagatgcggaaaaagcaggcctctatcaggtgatcggtaaagagatcgatgacaagtacatggctgagctgaagaagcagatcattcatcccgatgttattcaggaaatggctgatgacatcaagatcgtatatactccgttatgcggtaccggtaacaagccggtaagacgtatcctgtccgagctgggatttaagcacgtctatgtagttcccgaacaggagaatccggatccaaacttcaccacactggattacccgaaccctgaggatcccaaggcatttacatacgcactgcgtctggccaaggagaaggatgcggacatcgttctggcaaccgatcccgatgcagaccgtctgggtgtgtatgccaaggataccaagaccggcgagtatgtggcatttaccggtaacatgtccggtatgctgatcgcagaatatatcctgagagagaagactgctaccggcactatgcccgagaatcccgcactggtaaccaccatcgttaccaccaatatgaccaagcccatcaccgaagcttatggtgtaaagctgatcgaagtactgaccggcttcaagttcatcggtgagcagatcaagttcttcgagcagaccggcagcaacaattatgtattcggtctggaagagagctacggctgtctggcaggtactcatgcaagagataaggatgcagttgtagcagttatgtgtctgtgtgaagtggcggcttactgcaagaagcacaacatgactctgtgggatatgatggtatccatgtatgagaaatacggttacttcaaggagacccagtacaccattaccatgaagggtatcgacggtgcaagacagatcgccgagatcatggataagcttcgtaagaatccgcccaaggcattcggtgacctgaaagtggagaaattccgtgactatctgaacgatgtagtcatcgacatggagagcggcgagaagagcactaccggacttcccaagtctaatgtcctgtattttgagcttcccgacaatgcatggtgctgcgcccgtccttccggaaccgagcccaagatcaagttctacatgggtgttaaaggtaacagcatagaggatgcacaggccaaggtagagaagctgaccgaggatgtaaaggctgtactgtaaccaccatgagcaaatagcatgcaagtatgttattcaggaaagctctggaagagcgattttgcgaatggggttctgaatagttaatgttatttttaagagcgaatcgcccgggaagggcgatttgctcttttataaaagtggaggtatccgtggcaaagctgaacatagcaaaccttaagaaaactctatattatttgcaacgcaacggcctgagggaaacctggatctctgtaagggaacgcctgacagagacagaccgctatttttatgtgccctgtccggaagaggaactggaaaggcaaagttgcagaaaatgggataatccggttacactcagcattgtggtgccgttgtaccgtaccccggaaatctatctgaacagaatgataacaagcgttatgcaacagagctatcctcactgggaactgattctggcggatgccacagaggatcacagtgtggaggagacgttgacaaatcagggattcctgacagaacggctcctggaaaatgcggaaactattgcagcggatgcaaggatccactatatacaccttacggaaaatgccggaattgcggcgaataccaatcaggcattaccctatgcaaggggagaatatatcggcctgctggatcatgatgatgtattgacaccggatgctctgtatgagatggcagatgctattaccaaagcaaatgacagaggtgtcagagtcgcattcgcttattcggatgaagacaaatgcaacggggatgagacaaaatattacgatcccaaccataaagaagactttaattacgatttaatcctgagtaataactatatctgccattttctggtgatggatgcagatctgatgaagaaactggcattccggccagaatgcgacggtgcccaggactatgatctggtgctgcgggcagtgtcagaggtgctggctgcagatggccgctccggggaggagagaattcttcatattcccagagtgctgtatcactggagatgccatgaagcatctacagcagccaatccccacagcaagaaatatgcttacgaagcggggctgcgtgcactgcaggattatgcggcagaacgtgggatcccggcaaaggcagaggagaccagacatgtaggattttatcggttacaatatacagaggtattacaggagagaccggatgtggctgccgtaggtggcagagtgctgtctgggaaaaaccgcggcaggatcgccggcggcagaatgactgcggacggaaaggtgttctacgagggactgccgaaggactttggcggttatcttcatcgggcggagctgtcccaggatgcagaagcgttagaccttcgctgcatcaggatccggtcagctgacagggaattgtttgaaaaaatcgtgggagtgccttatacggaagtagtaagaggtccgaaacaacagccggtatttgacagctccacactgcctgccggggcagatatccggcttttaagtctgcaattatcggaagcattacgaaaacggggaagactgctgtatctgccggagtatccggagaaatgggagagactatgaaggaagtaaccgtcgttatacccaattacaacggaatgaaatatttaccggaatgcatggcctccctgtgtcagggacaggaaaatgcaccggaatatgaagtgctgatcatagacaatggttctgctgacgggagcgtggaatatctggacagcgaatggtgtcgcaaaaaagaggcaccggcagaagagggggggaaaccgcaggtgcgtctgatcgccctgccggagaacaccggcttctgtcatgcggtgaatctgggaatccgggaggcacgaagcccctatgtgatcctgttgaacaacgataccagagtagaagctggatttgtgaaaggactgtatgatgccattcggaaggatgaaaagatcttttccgtcagcgccaaaatgcttatgtgggataagccagagctgctggatgatgcgggagaccgctactgcgttctgggatgggcatattcccggggaaaaggccggcctgctgtggattatgacaagaatgtcagcatattctcagcctgtggcggagcggcaatttacagacgtcaggtatttgaggagatcggctattttgacgaagcgcattttgcgtatctggaagatctggatatcggttaccgtgcccggatctacggctatgagaaccggtacgagccgacggcatccgttctgcattacggcagtgcttctacgggatcccgctacaattcccgaaaaacggaactttcttcttccaataatatctatgtcatcggcaaaaatatgccgctactacagtggattctgaatctgccgttctttttgcttggatttggcataaaatttctgtttttttgtaagaagagaatgggaaaactatatttaaagggattggccgaagggtggaaacgtaccgtgggtcctgtgggaaagcaggcaaaggtgcactttcaatggagccatctatggaattatgtgaagattcagtggcaattatacctgaatgtttttcgaattcttatgaaatcttaagaaattgcttcataaattcttaagttgagaaaaaaccaccgttattgtagaatgaaatcgttgaaaagaagcttttcggacttaaagattgggtgacccgtatgataaaagacaaccagaaagtctttaacaggcttcttgtgataatagatgcgctgatcacggcagtatcttttgtccttgcctattatatcaaattttatatcttaaatgacggtccggggatcggtgtcctgccggtgcaggattattatatgctgcttccctttattgtacccggttatatgttcctgtattaccggtgcagtgtgtattccccgaagcgtacggttcgccgtagacatgagatatacagtatcctgcaggcgaataccattggcctggcggctttgatcattattttgtatatgatcatccgtgagatcaatttttcacgatccgtcatggcaattttttatgtcctgaatgtttttctgacttccgtattccgtatcatcatgcgcaaggcattgcgttccatacggaaaaaaggatacaatctgaagcatattttgctggtaggttattcccgggcggcggaggaatatatcgacagaatcctcagcaatccccaatggggatatgtagtgtgtggtattctggatgagcacatcccgggcggcacgacctataagggagtgaaagtactgggaacgcttggtaatctggaatacatccttccggagaacaagctggatgaaatcgcaatcacactttccctgaaggattatgattatctggaaggtgtggtggatatctgtgagaaatccggggtgcacaccaaattcattccggattacagcagtctgatccccagcagaccctatacggaggatctgatgggattaccggtgatcaatatccggtatgtaccgctgacgaacacaggcaatatggtgatcaagcgggcaatggatatcgttggttccattttcggtatcattattacctcaccgatcatgctcatatcagcaattctggtaaagctgtccagcccgggaccggtgatctttaagcaggaacgggtaggacttcataataagccgttttatatgtacaaattccgcagcatggcaatgcagacggcggcggaagagaaaaagggatggacggtacgcaatgaccccagagtcaccggtatcggtaaggttctcagacgtaccagtatcgatgaacttccccagctgttcaatatcttaaaaggagatatgagtctggtcggtcccagaccggaaagaccgcagtttgtggaaaagttcaaggaagagattccccgttacatggtaaaacatcaggtacggccgggactgaccggatgggcacaggtgaatggcttgcgcggtgattcctccatcaagaagagaatcgaatatgatatttactatattgagaactggaccattggatttgatatcaagatcattcttatgacgttctttacaggatttatcaataaaaatgcttattagtacaaggagaagacaagatggcaacaaattctaacaacaatggcggcaatggtcagagacctgccggaagcagaagaaaaccttccggaagcgcacagagacctacaggacagagacccgccggaagcggtcagagacctgccggcagtggacagagaaccggagctgcgaacggacagaagagaatgtctgccaaacagcgtgcagccaagaagagaaaaaaggttatcatctttggcatagagatcgtagtgatcctgttcatggtagcattattgtatctggtaatgactcataccagcaatgagggccccaaggtaaccgttctggagacagaagaacttcagattcccgaagaggtgcagcaggatgaaactatgaagggctatatgaacattgccctgttcggtgtggatgccaccaaggaaagcctgttgtacaagggcagccgaagcgatagtatcatgatcgccagcatcaacatggatactggtgatatcaaactggtcagcgtatatcgtgatacgtacctgaataccggtacggattcctaccagaaatgcaatgccgcttattcctatggcggagcagagcaggcggttaagatgctgaacatgaatctggatatggatattacgaactttgtgaccgtaggctataaaggactgagcgaagtgatcgacggtctgggcggtatctatattgatgtggactctgaggagatcaagcatatcaacaactatcagatcggtattgcagaagttttgaaatgcgattatacaccggtaactgagaccggtatgcagctgttgaatggtctgcaggctactgcttactgccgtatccgttataccgctggtaacgactttaagcgtgctgcccgtcagcgtgaagtcattcaggcaatcgaagatcaggcaaagaaagcagattatgcaacattgtccaaggtattcaacagtgccatcgacgacatttacaccagtctggattccaaggacatcctggatctgctgggcaatatttcaaattatcgcatagtggacgaaggaggtttccccgaagagaccatgcgtgacaccggcaatatcggtgcaaagggaagctgtgttattccggtaaatctcgaaagcaatgtagtatggctgcatcagttcctgtttgatgatgccaactattccgtaaccagcaacgtgaaggaatacagcaataagattgaatctgacacatcaccttatatgaataagtaagaaacagtgtatagagtaaagcaacaggaatacaagggagtcttccggaatctgccggggctcccttgtgcattacccagaaggttataagccttttggacagtaggaaaaggcttgtgccgcaataagagttaaagtataatgaaccagagattggaaaagtgaggagcgctctgacatggagatagatgtgatcattcccctgtataagccgggaaaagaattatttacattattagataaactgggcagtcagagcgtaccggtacatcaggtgattcttctgaatacggaagaaaaatattttgaacagctgatctacggaatcagatttctggaaacctatcagaatatcaaggtataccatgtatccaaaaaagagttcgatcatggcggtacgagacggatgggagtaaaaaagtcttccgcggatgtcttcgtgatgatgacacaggatgccatgccgaaagatgacaggctgatcgaaaaactggtggaacccctgcagggggaagtggcggtggcctatgcgagacagctgcccagagaggattcgacaccggtggagagctataccagagaatttaactatccggcaaagtcccggatcaaatcggcagcagacctggacagcctggggatcaagacctttttctgctccaatgtttgtgcggcctatcgccgggagatctatgaggaactgggcgggttcgtcagacatacgatatttaatgaagatatgatctatgcggcaaaggcggtggaagcaggatactctgtggcttatgcggcggatgcgcaggtggtgcattctcataattataccaacgggcagcagttccacagaaactttgacctgggagtatcgcaggcagagcatcccgagatttttgcagcatatccttcggagtccgagggaaaacgaatggtgaaagatgtgacggtatatttgcgcaacaaccatatgtctgccggattgccccatttttatatgcaatgcgcctgtaaatatgcaggttatttactgggaaagaactatcgcaggctcccgaaaaaatgggtacttgcttttacttccaacaaggaatactggaaacagaacagaaaggatgtatgactatgtgtggtattgtaggttatattggaacagaacaggcagcaccgatcattctggacggtctgtccaagctggaataccgtggatatgattccgcaggtatggcgatttttgacggtgagaagatcaacaccagaaaagcagtgggaagacttaaggttctggagaacctgacccatggcggagagaatatgaaaggaacctccggtatcggacatacccgttgggcaactcacggagctcccagcgatatcaattcccatccgcatatgaacaatgccggaaccattgccgtggtacacaacggcattatcgagaactatattcccctgaagaaaaagatgcaggataaggggtatcagttcgtatccgagactgataccgaggtattggcacatctgttagactattattacaagggaaatcctctggaagccatcacgaaggtgcttcatcgtgtggaaggctcttatgcgctgggaatcatgtttgcagatcagccggataagatttttgcagcccgcaaggacagcccgctgatcgtaggaaagagcgacaacggcagctttatcgcttccgatgttcctgcgatattgaaatataccagaaccgtatattacgtagacaatcaggaagttgtggaattacagcagggtagtctgcgtttcttctccgtggatgaggaagagatcgagaagcagccggtgaccattgactgggatgccaatgcggcagaaaaggctggatatgagcacttcatgctgaaagagatctatgagcagccgaagaccatcaacgataccatctctccgagaatcaaggataatgatattgtgatcgaagagctgaacatgagtgatgaagagatcaaagagatcacgaagatccatattgtggcctgcggctccgcatatcataccggagttaccgcaaaatatgtgatcgagggtctggcaagaatcccggtagaagtggatgtggccagtgaattccgttatcgtgatccgattcttcagaagggtaatatggtcattgtcatcagccagtccggtgagacggcagatactctggcagcactgagagagtccagggaaaggggcttcaaggtactgggcattgtcaatgtggtgggaagctccattgccagagaggcagacagtgttatgtatacctgggcaggtcccgagatcgcagtggctaccaccaaggcttacagtgcacagctgacggcactttacatgttggctatgaaattcgccagggtacgtggtactattgatcaggagaagttcgccggtatgctgacagatttaagatgcctgccggatcagatcgaactgcttctgggacagaaggagaagatccagcattttgccaaccgttacgtgggagcaagagatatcttcttcatcggacgcggtattgattatgcgatttcactggaaggatccttgaaactgaaggagatctcctatattcattccgaggcttatgcagctggagaactgaagcatggtacgatttctctgatcgaagatggtacgctggtagtggctttggcaacccagccggatctgttccagaagaccatcagtaatatggtagaagtaaaagcaagaggagcctttgttatggcagtcaccattgaaggcaacaaggccattgagaaagcgtcggattatgtaatatacatccccgagaccaatccgtactttaccaattctctggcaatcattcctttgcagttgttctcctactatgtggcagtgggacgcggctgtgacgtggataaacccagaaacctggcaaaatccgttactgttgagtagagtgtaataacttacccatagagagactgaggactgcttgcaggcagaacagactctctgttttttcaggattcataattgcttcagaaagttatcacaattcggacacaattgacggatatactgtgttcataaggtgagaggaagaaatgaaacaggtaatggtaaaaagagtttctcacttgcaacaggataggaggaagcaatatgtacgagaataataatttttccggttacggaaccggcaatgaaaatacaaccggtacattcagtggagcagatctgaatgagacaagaacagaaaacagttatggctatgaaaatcatagtactacccagagtgcagcaggaagcaccaatggttacaccacttatcagatgggcggaaccacaggcagcaacaatacggagcctaagaaaacccaaaaacatggcggttacttccggaaggcaatggtaagtgtcagcctgggattgttcttcggactgttcgcaggaatcggtttctatgcagtacagcagggaaccgggatgtttacgaccagcacagataccgcagtggtagatgagatcgcttctgaggcaacgacagaaagtacccagagtgcacagctggctaccaatgttacttatgtagagtccgatgtatccaatgtggtagaaaaagtaatgcctgccatggtatccatcgtaaataactttaccgagacagccaatgtcttcggacagcagtatacacaggaagaagcagccagcggttccggtatcattgtaggtaagaccgatgatgaactgctgatcgtatccaataatcatgtagtagagagtgcagatactctgaccgttacttttatcgatggcagtgaagcacaggcacaggtcaaaggactggattccgatatggatctggcagtgatcgcagtatctttaaatgatctgagtgatgataccaagaatgccattacagtagcaacacttggcagcagtgatgatctgaagcttggtgagccggtcatcgctatcggtaatgcccttggctatggtcagtctgttaccaacggtattgtaagtgccctgaatcgtgagatcactctggagaacggctctaccggtctggagaacggctctaccggtactttcatccagaccaacgcagccatcaaccccggtaactccggcggtgcactgctgaacatgaatggtgaggttatcggtatcaactccaacaagatcggtggtactgccgtagaaggtatgggatatgctatcccgattacttcggcaagtcctatcattgcagatctgatggagcgtcagaccagaaccaaggtagctgaggatgaagtcggttacatcggcatcttcccgcaggaagtaacttcccagatctcccagatgtacaacatgccggaaggtatctatgtagtatctgtagaggaaggcagcgcagcagccaatgccggtatcatgaaaggtgatatcattaccaaatttgacggcagcagtatctcttcctactctgatctgcagaaaacgttacagtattatgcggccggtgattccgtaaccgtaacggtacagagacctcagaacggtgaatatgtatccatcgagctgaatctgacactgggcagcagacctgcaagccagaaataaagaaataacaggtaaataaaaggaaatggaaagagacccgggcgagacatatggttttgcccgggtcttgtaatatttaccaaaatatgaatagttataaatggtttagaaaaacttaacttgtgccccgctacttcattgagtataataagcgtaggcaatgagaagtgtcagacacgggtattatgcaatatgactgcttgcaggcattattgcgtaatggccggggatgatagggcgaagcccggatatcgagggaacacgaagtgttgccgagatacactgcgaagatgctttggagccggggatgatagggcgaagcccggatatcgagggaacacgaagtgttaccgagatacactgcggaatagtggtaggaaacaaagaggagaataacatgacagataattataatgatgattatagagaagtgatccctaaggaggaaaaaacagagaccgatgtgagtgaaactcaggataacgaaaaaaataacggaaacacacaggtggcggatactgcaaaagaaaattccaccgaaaaaaagtcagaggacaaaaaggacagcagcgaatacgaagatgtctgctttatctgccgcagaccggagagcaaagccggcagaatgttcaagctgcccaaccatatctgcatctgcgatgattgcatgcacaagaccatggagactgtgagccagttcgattatcagggaatgttgaacaatcccaatgatttcaaccagtttaacggacagaacggattccccaatatcagttttgtgaatctggcggatcttcagggagacggcggtattcccaacaagcagaaactcaagaagaaaaagaaggcggaaggtcccaaaccggtattcaatatcaaggacattccggcacctcataagatcaaggccagtctggatgaatacgtggtaggacaggaaaaagccaagaaggtcatctccgtagcagtatacaaccattacaagagagtggccactgacactatggatgagattgagatcgaaaagtccaacatcctcatgatcggccccaccggttccggtaagacctatctggtaaagacactggcaaaacttctggatgtgcctctggctattgctgatgccacctctctgactgaggccggttatatcggtgatgatatcgagagcgtggtatccaaattgctggcagcggcgggcaatgacgtagaaaaggcggaaaaaggtatcatcttcatcgatgagatcgacaagatcgccaagaagaaaaacaccaactcccgggatgtcagcggagagagtgtacagcagggtatgttgaagcttctggaaggtgcggaagtggaggtgccggtaggtgccaacagcaaaaatgccatggtacctctggcaacggtgaacacccgcaatatcctgtttatctgcggtggtgcgttcccggatctggacgagatcatcaaggagcgcctgaccaagaccgcatccatcggtttcaactcagaactgaaggataaatacgataaagataccgatattttatccaaggtgactgtggaggatatccgcaagtttggtatgattccggaatttatcggtcgtctgccgatcatttgtactttacagggattgtcaaaggatatgctggtgaagatcctgaaagagccgaagaatgcgattcttaagcagtaccagaagctgttggagctggatgaggtaaaactggagttcacagacgatgccctggatgccattgccgagaaggcaatgaagcgcgataccggtgccagagctctgcgctccatcatcgaggacttcatgctggatatcatgtatgagatcccgaaggatgataacatcggaagggttaccattaccagagagtacattgaaggaaccggcggtcccatcatcgacatccgcagtaatgagatcctggaacccgtggagaatctgaagcagattccggtggaagagaaataaattgagagttagtgaaatacattggcaaaatccacgaactcccggagcatgc

SEQ ID NO: 1109 - DNA, 21227 bp, unidentified
  source 1..21227: mol_type = unassigned DNA
tcacagtaaaccgcacagcgaaagacctatttcaaatttttattcttatatagacaacgacttagcaagagataatcttgaaaacgatattccaagcgcagatttgcaggatttgtaatcagaaacggcataccatttcaatgttaaattacagaaatggtatgccgtattttaaaacttttcttccttatattccttaataatcgggataaattcttttgcgtatttttcctgtttcttaatacctacaccggatattctcaagaaatcattttcgtttgtcggaagttttgcgcacatatcacgcaaagatgcgtcgctgaatataacatacggaggaacgctggctttatccgcaagatattttctgcgctccttaagtttgtcaaacaacaccttattgacctctgtatgctgaatttctctgtgcagctcctctttaacggcgaggcgcattgtaaggcttttttgccctttcaaaatcggatatgatttttgcgttacctttaaaacagggtatttgtcctcggtttgagttatatattcttcgtcaataagcctttttataagctcatttataaccgttctgcgcttgtcactcattatgccatatgtagactgattatttaacatgtatttgtaaatattctcgctttttgagcctgcaagcacagcggatattgtagaagtgccgaaccgctgccctgttcgtataatgcaagaaagaatcttctgcgaatctaccgttacatcagcaagcttgtattctttaaggcaaaccgagcagtttttgcactcgtttgtgtgatactcaccgaagtagtttagaatataatttctaaggcaggtggtagatgtacagtaacctaccattttattaagtttatagtaatcatttttcttgattttttcacgctgttcttcggtaagttcggcattctcgtcattattttcaataaaaaatttttgtgtatgaacatcaccggggctgtacagcaaaacgcaatcggagttttcgccgtcacgacctgctctgcctgcctcctgatagtagttttcaagatttttcggcatattataatgcaccacaaagcgcacatcaggcttatcaattcccattccgaaagcattggttgcaacaatcagattgcatctgtcattaatgaaatcgtcctgatttttgcttcgtatttcattgctcaatcctgcgtgataaatcagagaatcatagccgttttcattgagaaaatcgctgactttttctacatttttacgggtagcacagtaaattattccgctctgatttttgtgttcgctcacaatggcgagtaattctttttgcttgttttgcggacgctttacggcgaagaacaaattttttctgtcaaaacccgttgttatttcaaaaggatttttaagaccgagcagatttagaatatccctttttacagcgtcggtagccgttgccgtaaatgcggcaacgaccggtctgtcatcaagtttagaaataaaatcggatattttcaaatagcttgtgcgaaagtcgtgaccccattgcgacacacagtgtgcctcatcaaccgcaatcagagaaatttttatactgttgcaaagattaagaaaagcgggcgcttcaagcctttcgggcgcaacataaatcagtttgtattcgcctcgcatagcgttataaattgctttcgactgttgggcgggagtaagcgtgctgttgatgtatgccgctctgattccgttttgattaagcgaagtaacctggtctttcatcagcgaaataagcggagaaatcacaattgcaattccgttcgacataagtgccggaatctgatagcaaatcgactttccgccgcccgtaggcataatacaaagcgcatctctgccgcttgaaatattatctattatattttcctgaccgtcacgaaacgaatcgtggccgaagtattgttttaaaagttcaaacttatccataataaatattatatataaaatcaaaattattttcaagcaaagagccgaaaatgttgattattagccgaaaatattttatactatagttgtattttttatttggagtgatattatgttatttttagaatatccgaaatgttcgacctgcaaaaaggctaagaatttcttagacagcaaaggtgccgattacgaggacagacacattgttgaaaataatccgacagccgaggaattaaggcaatggcacgaaatgagcggacttgacattaaaaagtttttcaacacaagcggtatgctttataagtcaatgaatttaaaggacaagctgccgcaaatgtcgcttgaagaaaaatatcaactgcttgcaaccgacggaatgttagtaaaacgccccattctcattaacggtgataaggtacttacaggatttaaagaggcagaatgggaagaaataataggataaggagcaattatgaagaaatttatatcttggaatgtaaacggtttaagagcctgcgtaacaaagggctttcttgacttttttaatgaagtaaatgcagatgtattttgcttgcaggaaactaagctgcaggcaggacagatcgacttacagcttgacggctatcatatgtattggaactacgccgaaaaaaagggatactcgggcactgcacttttcacaaaagaagagccgataagcgtaacctacggacttggaattgaagaacacgataaagagggcagagtgataaccgccgaatttgaggactattactttgtgacctgctatacgccaaattccaaaaacgagttattaagacttgattacagaatggtttgggaggacgctttcagagaatatctgaaaaatcttgaaaaaacaaaacccgtaatcgtatgcggcgacctcaatgttgcgcataatgaaattgaccttaaaaatcctaagacaaatcgcaaaaacgcaggctttacagatgaggaaagaggtaaaatgactgcgcttttagacagcggatttaccgatactttccgctatttttatcccgacagagagggaatatactcgtggtggtcatacagatttaaagcgagagaaaagaatgcaggctggcgtattgactattttctcacatcaaaagcccttgattcaagacttgtcagcgccgatattcacacagaagttttcggcagcgaccattgccctgttgaacttgtgattgaataaattaatcagcctatgaaatacgaaaaatcttgcggagctgttgtatttacaaaagaaaacaacgaatataaatttttaattgtgcagcagcttcaaggctttcatggatttccaaaagggcatatggaagcagatgaaaccgaagaacaaaccgccttacgagaaatatttgaagaagtcggtgtaaaagcaaatcttattgatggcttcagggtagtagacgagcatataattccgagcaaagtcgatacagtaaagcaaatagtttattttcttgctgaatataaaaatcagaatgtaaaatttcaaaagtctgaattatcagccgttaaacttttagcgtttgatgaggcttacaatacttttgaatatgaaagctcaaaaagaatactgtctgcggcttatgatcatttatctaaagcagtttactaagcaaaaaaacctgcactctataattaaagtgcaggtttttgttttgaaaaaatcaacagattttatacagaattaaacttcggcgattacttcaacttcaacgagtacatccttagggagctgttttacagctacgcaggaacgggcaggcttttctgtgaaatacttgccatatacggcgttgaatgcggcaaaatcattcatatcctttaagaaacaaactgtctttacagccttttcaagtgaactgccggaagcctcgagaacattcttaaggtttgtgcaaacctgttctgtctgtgcctcaattgttgcagcctcaacattgccgcttgcaggattaatagcaatctgacctgatgtaaatacaagaccgtttactacaactgcctgtgaatatgggccgatagcatcgggagcattttttgtatagattttttccataataaattcctccatatattatacaagcttaaagcctgcgttaataagtgcgtctgtaatttcttttacatggtcaaagtttcttgtttcaagtacaattcttaggtaacagccgttaatatcagtaccctcgcttgcacgctcgtggtggatagaaataacatttccgcccttgtcagcgataatatcggctacctgcttgagctgacccggtttatcctgaagttcaatgcaaagtgtctgtgatctgcccgatcttaaaagaccacgcttaattactcttgaaagaatagtaacatcaatgttgccgcccgaaattacgcaaacaacttttttgccctttacaggaagtttgttgaacattacagctgcgagaggtgcagcgcctgcgccctcggcaatcatcttctgtgattcaataagttttaaaatagcagatgaaatttcatcatcggttacggttacaatgtcatcgacatacttctgaacatacttaaatgtgtgctcacccggttctttaacctgaataccgtcagcaacagttgataccttgtcaagatgaacaggcttaccttgtttgattgactcgtacattgacggagcaccctctgcctgaacaccgtaaaccttgatgttagggttaaggctcttgattgcgcaagcaacacccgagataagtccaccgccgccgatagcacaaactacagcgtctgcgtcaggcaattcttcaagaatttcaataccgattgtaccctgacctgcaattacattttcatcgtcaaacggatgaataaaagtatagttatgttcgtcacgaagctcacaagccttattgtaggcatcgtcatacacacccggtaccatacaaacctctgcgccgtagccctttgtagcctcaaccttagagatcggagcgccgtcaggcaagcagataagtgatttaataccgtattttgttgcggcaagcgcaacaccttgagcgtgattacctgccgagcaagcaataacaccacgcttcttttcttcttctgtgagctgagaaatcttatatcccgagcctcttaccttaaacgaacctgtaatctgcaaattctcaggcttaaggtaaacttcgcaatcatcgctgatagcggttgccttaacaagcggggtagggataactacatctttaagtacataagatgcgtgatagattttgtcaagtgtaaccatataaatctcctctttcactcttattactttataattataaatcagaattgaaccaaaaacaagtttttttgcaatattcttcaaaaaatattgcatatttctgccgcaattattgatttgatttacataaaagaaagttcggcacattatcattgctttttaatgtgccgaacagtaaaattatgcttattctgtttttatttcttcaagttcgttttcgtcggaaagttcattttccttaatggcatcatctattcttttgccctttgtaaggtaagagaacggagcggaaatcaatattgcgccataatatgtaataaatctccacaacaggattgcaggcttaattttgtttgcaagtcccacaacaaagaacgggccaaagtacattgtaaacgcaagctctgcaccgccggatgcacccggcagaggcacaaggtttgaagtaaagagtacaaacgactgaatacaaattgtatcaaggaaattaagcggaacctgaccgtgctcaacggcaatgctgtgcatatcaaaagaaagatatacaaaatacggaacagagaggatagcaattacttgcagtgcaacaagagcataaagcaaaatcatacgctttttattttcgtaaagcagtttgttgcctgaatggaaaagctcaacctgctctttaagcgatttcacttttttatccggatttttgataaatttgaatttatgtaaaattttatctataaacttaataattttacctgtaattttcggactgaacgatacaaccaaaaacaaaacggtaacaactgtttgggtcaaaaagccgagtacgataaacagggtagaccatatattggtaaaagccgctttaaaataatcaaactttattataatggcgagtacgctgaatactcccgtaacaatctgataataaacaaatttttgcgtcatacacgccgagccgaacccgactccgactttcatttttgaaagaagatacaactgcataggttgtccgcctgtgttggacggagtgacagcaccgaaaaaaacaccgaccagcgcaactttgagagcgtcaataaatctgaaatcgggatattgtattctaataagtatctgcgttacaatactgtctataactatattcatatcaaatgcgactatgcctgcaattatccatccccatataaaaccgtcgggtgaagaaagcaagtcaatcattccgttttcggaaacgcagaaaaagactataagataaaaggtaatgccaagaactattatattaaaaataagctttccgcttattctaaagcgttttcgctttttctcggtgctcaagaaatctcctccaaaattttctattcacaaaaatgtgtactttaatataatacaatcttttttctgaaaaatcaatttacaattctgtcacttatgcacttttgttgtaaaaaatatatattttgcgataatttgtagaataaagcacttgagaattatcaaaaactgtgatagaattaataaaaacagataatatatttaggatgatttaatgcaattttttaatttttacggaatacccgttattgcggctttatttataatttggatgattttcagatatattgacaaaaagtacaagccgccgaaagacacggtaaacagaggattaaaagcatttgaacaaatcggcggttttgcggtaatcttctgtatggtatgcggattcggaatacagggtaaaggatttttgtcggaaacaatgcgcaacttttggattgtttcaacggtatttttaattttactgcacattgtaagttgtataatgttttatcgcagcagaaaccacacactgcatatgatgacggcaatttttccgagtataatttttattcttacaggcttgcttgagcaagacccgccgcttttattgtttgcaattatatttgcaataggcaaaatatatatgaccgccaaatctgaaagttaattcggtgaaataaaatgaacattgtaatgctattaaaaccaaaagaaacagtggcttatatttatgaagacagcaccatacgacaggcacttgaaaaaatgaaagcgcacagctacaccgcagtacctgttattgacgaatacggcaagtatgtcggcacagtcagtgagggcgactttttatggtacatagtcgaaaagcaaacgcagggtatgaaatcgcaggaaaagtattttgtgcgtgaccttatccgcaccgacttcaacccgtctgtaaaaataagcgttgatatgaaagagctttacgagagagccttgaatcagaactttatccccgttacagatgattcgggagtattcataggcattgtaacccgtaaagatttaatcagccactttgttgacaaaagtaaattataaagtcaaatccaacttaaaatccatactgaacaacaaaccctctgtaagtttttgcttacagagggttgcttattttatcggttctgttttatgtcggtactttaatgaattgtgttttggcaaatttttataattacttgacaaagcattacgctaagcaacaattcaaaaaacctttaataaagaacttatattaaattttgcaatgtttcgtacaagtttgcgtcagcttttttaataggcatcggcttatttgagcggtttacacagcaatgtgtggttctgcctgttgttgcgagaatatcggaatcggcaaatctgatttcgtattcaaattccatttttgctgccgacatcttagtaagttttgtggtgatgtaaaccttatcgtcaaatttcaacggcacaatgtactttgcgtatgcgtcaacaacggcaatagaaacacctttatcctcaagtgctcttacatcgcagccgatctgctccataaagtcacatcgtgcttcctcaaagaacctgatataatttgaatgatggactatgctcatcatatcggtttcatagtaattgattcttcttgaatatggttttatctgcaaaaaatcaccctttattttttaataagcaaaccgtttttcaaatcttctttagcctgctgtcttattttgaagtgttgctttttacctgtcgccgtatgtggcaattctgtcacaaagcggtaatatctcggagcctgatactttgaaatatcaggggaatttgcgcaaaattcaaaaagctccttggcagtaaggctttcgtcctcgggaataacataggctgcaacgctttcgccacgaacactgtcaggcacacccgttactatacattccgaaactttagggtgcttattgatagcctcttcgattcttgcagggtagatattttcgcccttgctgataatcatatcatcttttctgcccgaaattgtgataaattgattttcgtcccaagtgcctacatcgcctgtgtacatccagccgtcggcaaatttatcctttgaggctttttcgttgcctacatagcaataggttgtcttaccggggcacttaataattatttcaccctctgtcttgccgtcacaaggaacagtatcatcgggatttgcttttccctcatcgtaaacatttacgattctcacctcatcatcggtacatgaacgacctgcagaacctgccatttcaggtaaatcatacgggcgtaaaaatgtattccaaaatgtttctgttgtgccgtagccgttaaaaatattaggtgtaagcacattctgaaaacgaatacaagcctctttttcaagcggactgcccatagttattataccctttaaagaagaaatattcttagggtgcttttcctgtcggcttgcaagcagagtgagaattgacggtacacctgttataaaagtaatcttattgctctctacatattcaaggcaggtcttagggttaaaattacgcataatcacaatacatccgcctacatacaaagtaggggtaggaccgcccgaatgtaaaccgccacggtggaaccacggcgtcatattcattgtaatgtcggttgggttgagcgggaaatgcataattacatcgtgtgccgaaagcacttcgtttacattgttgagcggaacaccctttggtgtgcctgttgtgcccgaagtctgcaaacgaacaacctcatcatatatatgcggctcaaaatcaacaggcggattttcgtctgaggcattcttgatatagtcctcaaaaagaatatgtccctgcggaagttcaatttctttaccggagttgtttacggcgataattacctttggagtatgagaagtgatttcaagagcctttacaacggtatcaaggatttctgtgtcatacatatatacagtaggcttgttgtgaccgatgatttccgctgtttcgcccggagaaagattaaagtttgcgggattaccgatagcaccgagtttttgcggtgatatatatccaagcaaaaattgtgtagagttaaaaagctgcataaatacaacatcgccctttttaacaccgtctgctttcatggcatttgcaaacttatttgcagctgtgtttaattctgtatatgtccactttatgttacgggcagggtcaataacagctgttctattgccaaaacggcgaacatttctcataaagccgttaagccatgtaaattcgctttcaaatgtttttacaaacatatctgtatcataagtaaactgcataaatttctcctttatatcgttagggattatcccttgtatctgcctacaataatgcttgaattctgtccgccgaagccaaatgcgttcgacatagcataatctatttcggctttctttgctgtgttagcgacaaagtctattccgctgcactcggggtcaacttcatttaagttgattgtcggcggaattactcctgtttcaatagcctttacacaggtaataacttctgtaatgccgcctgcgcccatcatatggcctgtagcgcccttagttgaacttacatacggaagtttgtcaccgaacacacttttgattgatgcggtttctacagtatcgcccttattggtagctgtgccgtgagcgtttacataacctatctgtgatgcgtcgatatttgcctgtgcaatagcctgtttcatacaagcaatagcgcctcttccttccggatgcggagctgttacatggtaagcgtcatctgtgttgccgcagccgagaacttcgccgtaaatctttgcgcctcttgcaagtgcgtgctcctcggtttcgagaacaagcgcaccgccgccctctccgattacaaaaccgtcacgggtaacatcaaaaggtctgcttgcggtagcgggggagtcgtttctgcgtgaaagtgcctttgcgtttgcaagcgaataaattacgagcgggcagagaaccgactccgcaccgacagcgagcattacatcggctttgcctgtctgcatacacatacaagctgtgttgattgcatcgccgcccgatgaacaagctgtgcttacggtaaggctcggaccttgaatattgtggtcgattgcgatatttgcagcggcaatgttgccgagaattttaggaataaatctcggtcctacctttttatgtgcagcacccgaaagtgcgtcttgagtgaacgcaattgtagcaatgccgttcatagctgtacccattacaatacctgtgcgttcaggttcaatttcaaggttgctctgctttaaagcctcctctgcagcaatatatgcatactgcataaacggatccgtttttctgattaagtctttcggcatataatccgacgggttaaaattctttacttcgcccgcaatctgaaccgcaagttcagatgcgtcaaaacttttgattgtgtctataccggacgcgcctgctgtgatattttcccagtaattatctacacctatgccgataggtgtaactgcgcccatacctgtaataactatttttttcataactgctccttgccgcataattatttcgcataattatttatagttttatagtatttgattattatttgatttttgcatactattatgctatactcaaattataacagaaaggaaagaattggtcaactaaagttttaatgtaattatttatcaattttgacttatttattcacttcctgcataacaagatacaattagcgaaaggaaagttaatttatgtgggataaaccggttaaaatgcttttcacttccggatttattcctgcattattatcttaaaacaattattactgtaatatataatttctgcggattccgcttttcttttgcgtgaaaagaaaagctccaaaagaaagcacgcttaagagaacagggctttcgaggcccttttcccttaagtatccttttttcccacacgaccaaaggtcagcgacctttggaatcttctgactttttatttatagttagtttttattaatattttgtttttcaaaaaacattattgactttttataattcaattgctatttatcttatatcatagaaaggaaactttatttatggacataagtcagttaaaatgttttatttcggttgctcgcacacttaatttttctgaggcggcaaggcgtaattatgtttcgcagtcaacagtaagccgatatataatagaccttgaaaaagaatttggggtacagctttttatacgctcgcaccgtgatgttctccttacaaacgagggcaagactttgttgccgtacgcaatagaaattgtagaaaccttgaacaaagccacatctataataaagcagatgcatgacggaggaaagggaagaattactgttgcgtgcgaccaaacctctttttcgtttccgacaaaatgcataaaagaatttcgcaagcgttatcccgatattacggttgatgtaaaagaacttgacggttcggaaaacggcaatgtactcggcggagattatgacttttgctttatgccgagggatatgctgcccgaaagctcatctgtcgagtctatagtaacccacagcgaacagctttatgtaattgcagacaaaacaaatactgcggcaaagcagaaaaatatttctatggctgaccttgcaaacgaaaaacttgtacttctttctgaaaatgtttctcccatactgtatatggaggttatggatttataccgcacttttcatatttcacccaaaatcacaaatacatttgacgatgtaaaaagtatgtatatggcagtggcggctggtatgggaatttctattgttccgagttcactgcttaatttttcatcggacaaaagctgttcaagcataccgctaagcgatgctgacacaagcatttcttatgttatggcgtggagtaaatccgctaccaatcccgttgcaaagcattttcttgagctcgtaaaagagtatgcaaacgatgttgataacatttacgggttataatgtgactgttctgtgattatatataataatatttgtgatgtaataaaaacttttctatattttcacataaattttacttaaaaaccctttactttggaaataaaaggtgttataatatccttagtcaataaaaaagtgactaatatttcctattagggggtcataataatgtacagattcacattaccaagagatctttatcacggaaaagatgctctttcaagtttaaaaacactcgaaggcaaaaaagcaattgtagtagtaggcggcggctcaatgaagcgtaacggtttccttgacaaggctgttgattatttaaaagaagcaggaatggaagttaaactctttgaaggtgttgagcctgacccatctgttgacacagttatgaagggcgcagccgttatgagagagtttgagcctgactggattgtagcaatgggcggcggctcaccgattgatgcggcaaaggctatgtgggcattctatgagtatcctgaaatcacatttgaggatcttatcacaccgttcagcttccctaaattaagacagaaagcaaaattctgtgctattccgtcaacttccggtacagctacagaggttacggctttctctgtaattaccgactacgacaagggtatcaagtatccgcttgccgacttcaacattactcctgatgtagctattgttgacccgtcacttgctgaaacaatgcctaaaaagcttacagctcatacaggtatggacgcaatgactcatgctattgaggcatatgtatctactcttaactgtgactatacagacgcacttgcacttcacgcaattaagatgattcacaacgaccttaaaaagtcatatgacggcgatatggacgctcgtgatgctatgcacaatgcacagtgccttgcaggtatggcattctcaaacgctcttctcggtattgttcactcaatggctcataagacaggtgctgcattctcgggcggtcacattattcacggctgtgcaaatgctatgtaccttccaaaggtaattaaatataattcaaaagacgctactgctgctgagcgttatgcacagattgctaaattcatcgaccttaagggcgaaacaacagaagaactcgttgacgcacttatcgcagaacttcgctcaatgaacgatcagctcgacattccgcaggctattaagaactacggtccgggcggcgttaaggctgatgtaagcattatcgacgaaaaagagtttatggataagctccccgaaacagctaagaatgctatcgcagacgcttgcacaggctctaaccctcgtcagccaagtcaggaagaaatggaaaaactccttaaggcttgctactatgacctcgaaattgatttctgattaatttccgaataattaaacaataagttttttcattataatctccttttctttatacttaatctatgaattctaattataatattgttttcatttgataacctcaaagcctgcccttgcataatgtaagggcaggctttctgtttggattttttaaattaagttgatttacataatatgagaaatcagatagcaaagcgctatgccaatcattgtcggcataactatcgaaaacatcgtccagcccatactaccagtttcttttttgattgtaaggcaggttgtggagcatgggaagtggaagatgcacattactattgtacagattgccgttgtaagcgtccagccgttttgcgtaagcaatgcaaaaagttcctcataacttgcaaaatcagtcagcgtacccgtggaaaggtacgacataattattatcggtatgacggtttcattagcgggaaagccgagtacaaaagccattataattacaccgtcaagacctatggctctgccgaacgggtcaaaaaaatccgtacaatacgaaagcagtgagctgtctgcaatatagatatttgcaagcagccatatcagcgctcctgccggaattgctactataaccgctctgccaagtacaaataaggtacggtctaaaaacgaactgactatagtttttagaattctcggcttgcggtacggcggaagttcaagcgcaaaagccgaacgctcgccgcttaacagcgttacagacaatattttagacacaaacattgtcatcataaccgcaaaaagtatcagtaaaacaaggattaacgctatgcttattgaacttgcaaatacgcaggcactgcccgaaaagaatattgtaatcagcgcaataagcatcggaaatcttccgttgcagggcataaaattatttgtaactgtcgcaatcagtctttctttaggtgattctattatgcgacagcccgtaactccgcaggcattacagccgattcccattgccatagtcagaccttgcttgccgtgcgcaccgcattttgaaaagaatttgtcaagattaaatgctatcctcggtaaatagccaaagtcctctatcagcgcaaacagtgggaaaaatatcgccattggcggcagcattaccgcaaccacccaactgagtgtcgtgtatattccgtttataaaaaagccttttataaaatccggtgcattaaaaaaatcaaatacatataccaaacctacttttatatattcaaacagttcgctcaaaaggcggctcggataatttgcgccgaccgcagttatccagaaaagcaaaccgagcaaaagtatcataataggtattcccgtaattttagaagtaagtattttatcaagctttttggttttttcgcttatgttttcaccgcatttttttatacagcgactgcatatttcctttgaccgagcggcaagaaattcagtgttttctttgtgcttttccttattaaaaatatctattccgtcatacagccttgtaacacgaaagcattttgttttttcggtgcagacatcgtaaattttctctcggattttttcaatatcgcttttctttgtcgcattggtgcttataacaggtatgccgagattcagcgacagctcatcttcatcaataacaaaaccgtttttacaacattcgtcgctaagattgaggcacagcaccgcttttttcgttaccgaaagaacctgtagggtaaacgaaagattccgttcaagcacgcttgaatcaattacaataaccgtgcagtcaatgtcatctctgacaagaaactgccgtgaaacttcttcttcgggtgaaaaagaaatcatagaatatgtgccgggtaaatcgacgacggaaaaacttttctctttgatttttgtgcaccctttggcatactcaacggttttgcccgtccaattgcccgtgtgctgtttcatacctgtaagagcattgaaaatcgtgctttttccgacattaggattgccggcaagtaccacattgtagtctgtattgtcgcacatttttccgtttgcctctgttttacggctgtttcttgtcagcaaataaaaacctcccaactttttaattatttatgcgtaatcccgatttaggcgtaccgtaattttactgcaatcgctttctctaagcgcaattaccgttccttttgacaaatacgctgtcgggtcgccaaacggacttttcattatcggcacaattttctcaccctctgttatgcccatatcaaaaattctgttttttatgccgttgccgcactcgatactgtctatataaacctcgcaattcagcggaattttgtcaagagttgttttttccattaacttcacctgaattttctgtacatcgcatataggtgtgcgccgtacttacattttgattactaacagagtattcagacaaaactatatagttacaattttagttttgcctttaaaatttacattacctatgttataattgttataagcaatgcactccgcacataaaaataaaacggggtgttcggctttatgaaatttaagaaaatcttgtattttacaatatgttttattcttataattgcttttgtttttctgattacaatggcttattttcgccttaatgtactgacgagtgaaagtaatgtcagcgaaaacacgcatactgtaataatcgacgcaggtcacggcggtgaggacggcggcgctgtaaatgataacaatgtggtagaaaaagaccttaatctgcaaatatccgtaaaacttgcggatatgcttacactgttcggctataaaacagagcaaatcagaacagaggacaaatccgtatatacacaaggcgaaaatgtgcgacagcgcaaagtttccgatatgaaaaaccgtctttctgtatttaattcaaatcccgaaaatgtggtaatcagtattcatcaaaataagtttaccgaaagcaaatacagcggaacgcaagttttttattcacctaacaatccgcagagcgccgatcttgcggagagtatcagacaatctgtaaaaactatgctccagcctgacaatgaaagggaatgtaagaaagcggataaaagcatttatcttttaaaaaatgcgactgtgcccgctgtaatatgtgaatgcggatttatctctaacgaaagcgaatgtgcaaaattgcaggacgatacctatcaacaaaaaatggcttatgcgatagctgtcggactgatgaatgtttattaaaggaagtttaatatggcaaaaattaaaagtgtatatatatgctcgcagtgcggctacgaatcaccgaaatggtacggaaaatgtccgacctgcggcgaatggaacacaatggaagaagaaatcaaagaaagcgtgaaaactgcgcctgccgtaaaaagaaaggtagcttctgcggtttcttctccttattcaattacggaaatcaccaccgaaaacgagcaccgctacgatacgggctgcggcgaacttaaccgtgtgcttggcggcggcattgtaaagggcagtcttattttgctcggaggtgacccgggtatcggcaaatcaaccgtgttactgcaaatatgtcaatatctcggcaactcaatgaaagtgctttatgtgtcgggcgaagaatcacaaagacagcttaagttaagggcaaaccgactcggtgtaaattctccgaatatttttgtaatgaccgaaaccgatgtagaagtagtgtgcgaacaaatccgtgctgaaaagcccgatatagtaatgatcgactcaattcagacaatgaatcttacagaattaagctcctcaccgggcagtgtaacgcaggtcagagaatcgacaaactgccttatgcgcacggcaaagtcgcttgatattccaatgtttgtggtaggtcatgtaaacaaagagggttcaattgcgggtccgaaagtgcttgagcacatcgttgataccgtactgcactttgaaggtgacaagcaaatgtcatgcagaattttaagagcagtcaaaaacagatacggttctacaaacgaaatcggcgtgtttgaaatgaccgacacgggacttgtggaagtgcccaatccgtctgtaatgttgctgtcgggcagaccgaaaggcgtatcgggtacttgcgtaacctgtacaattgagggttctcgtcctattcttgcggaagttcagggacttgcaacgcaaagcggctacggcaacgctcgaagaatggcaacgggctttgactacaaccgactttcgcttttgcttgccgtgcttgaaaaaagagcgggatattatttttcaaacaatgacgcttatataaacattgtcggcggtcttagaattgacgaacctgccattgaccttgcggtcgcaatggcgcttatcagcagtctgaaagatgttccgattgacgagaatgttgtagtgttcggcgaaatcggtcttgccggcgaaatcagggcggtttctcaagctcaattaagagtaaacgaggctgtaaggcttggatttacaaaaatcattcttccgtatcacaatctgaaagccgtaaaatgtgacggtgcagagcttatcggagttaaaaatataagacaggcctttgaggcagtcagcatatgagcgcctttgtaatgtccgacaagtacccgaaactttgcaaagcaattgaaaattttgggtacgatattataccgtcggataaaattttacaatttaatacacccgagcagcggcacattgatatgcaaatgctaaaaatcaacaacgatatttttttgcttaaagaatgtaataatttaaaaagacttcgtgaaaacaaagaatataatataattctttgcaagaataatattgacggtaaatatccgcattgcgtggcacttaattgcctgtatatcagcggaaaattatacggcagggaagaggctatagatgtttcagtcaaaaattactgcaaggaaaacggcattgagatagtcgatgtaaaacaaggttacacacgctgttcaactgcggttatcggtaaaaacagcgccataaccgccgacagcacaatctataatgcgcttaccaaaaacggaattgatgttctgaaaatcgacagcggaagcataagacttgacggatacgattacggatttatcggcggtgcgtgtacaatgattgatgacggtactgtagcgtttttcggtgatataaaaactcacccgaatttccgaaaaatcgaaagattttgtataattcataatgtaaaaataattaatttagcagaaaataaaccgcttacagatgtaggcggcgcagtaaagatatgacaagccccggctttggaaaaatcaaagtcggggctgtttttttattagtgcctttatcaaaagttgaggtaaattatggtttagattaaataattttaaaattcaggtaaacgttataactcgtaataaatttttattatttttcatcggattttttattggatttttgctttaccttagacaaaggatttttctcggcggcatttttcatctgctcggaacttaagtgggtgtaaatctcggttgtgccgaggttttcgtgaccgagcacatcttttagcactcgtatgtcaactccgccgtactgatacatcagtgttgccgcagtgtgccttagcttatggcaggagtagccctgtgcattcagaccgattttttcaagatatttatacaccatagcctgtatggtttttacgctcattctgcggtgatttcggctgataaacagcgcatatttgtccttaacgccgtcaacgggccgcacccgcatataattttcgattgcggaaacgcaggcggaattaaggtaaataattcgttctttgttgcccttgccgacaacacgcatagtgtcatcctgatgaatgtccgtgtaattcaaagacgccatttcagacacacgcaagccgcaatttaaaaacagcgtgagaatacagtaatcacgctccttataatcaccgtcgactgcattcagcaattcaagactttgctcaagcgtaagatactttggcaaagattttttctttttgggaacttcaagctgttcaacaggattgctgtcaagcacgcatttttttgttgcgagatagttaaaataacccttaaggctcgagcatttacgggcacgggtaacattttgatttttgcgctcacgctgaatataattcataaattcatatgcgtcgttcaacgtgacggttttcacaagttcaaggtcaacatcagaaatcgaaatgttctcaaattcagaatcattcggaacaagtccacgctgtaattttataaatctgaaaaatgtacgcaaatctatgtagtactcatcaacggttttctgtgattttcctttgaccgtctgcatataaaacaagtaatccttgattatctgcggcgcttcatctatgaaagaaatactcatttaaatgcttcacctttcccctcaattatacaaaacattgattttgtataattaactatatttttatacaagggtagaaagcctgtaatttgattacagattgcaggtcttctacccactttacttacacattattatatcatatgacatataaaaagcaaagcgttttctcaattgcattttacatatcttctgcgttgtaaatagatgtgaccatctgtactttttctcccggtaccgtcagttccgaatatctgcgaattgccttcttcttacacttgacaaactatatccgtattttctacttttctttttttattggttcacatcattttaacacacacaataaaagcggtatttgcaaaaatataataattgacttttactgcaaaaaagactataatttattggtatgcttttgtctttacaatattgctacagtaaattgtaggggcggacagtgttcgcttggtcaaagcttttgccaattgtcactctccgtcctttagttatgcaataaatacagcatattagatttttttatgaacaggggtgcgtgaatggagcagtcagaaaaaaataccattatatctttaagggatatattcgtccgatttgacggagaggtaatattaaaccatataaatcttgactttaaagacaaggaatttattactattctcgggccgagcggc

SEQ ID NO: 1110 - DNA, 50407 bp, unidentified
  source 1..50407: mol_type = unassigned DNA
tccccaccatgaagataagccctaacatccggctgtaattgtgttaccatccttttcacctacttataaaattcatcatcaactatatggaatgtctcaatgtactcatcaaatatttttaaattcacaagtactaactgtcctaacttatagattgctttggcatccttagccatttgcataaactttgatacgctcatatgatacatttctgctccttcgctatatcttacaaactttgtattaccattcttcttaaattcctgatatgcctttgtgtgttccatgctattctcctttcggtatttcaattgttcctataacgcaaaaagaggacatcttctaaatttctttagaaaatgtcctctaagtaatacaatctttaatttttcagactaagcaatctgtactaacctgtactaatctttttttgactatgccaaaaattggtcaaatcttggtcaaaaccccttgaccaactatatattttagtacatccacgctctgaaacccttgattttcctgcattcctacttatcaatagacttcatcgtcgggaagagcagcacgtctctgattgcctccgcgcctgtcagaagcatacacatacggtcaatgccgaatccaataccaccggtcggcggcataccgatctccaatgcgttcatgaagtcttcatctgttgtattggcttcatcatcgccctgtgcaagcagttcttcctgggctttaaaacgttctctctggtcgatcggatcgttcagctcagaataagcatttgccatctcccaaccattcatgaagaactcgaagcgctctacatattccggattttctggctttttcttcgtcagcggcgagatctcaaccggatgatccataacgaacgtcggctgaagcaggtgctcctctacaaactcctcaaagaagagattcaggatatcaccttttttatgtctctcttcaaactcaatattatgctcttttgcaagttctcttgcctgctccagagtctcaacttcattccagtcaacgcctgcgtatttcttcactgcgtcaaccattgtgatacgctcgaacggcttaccgagatccatcgggattcctttgtatacgatctgtgtcgttccgagcacttcctgtgcgacaaaacgatacaggttctctgtcagatccatcatgccgtggtaatctgtaaatgcctggtaaagctccatcagagtgaactccgggttatgtcttgtatcaagaccctcattacggaatacacgtccgatctcatataccttctcgagtcctccgacgatcagtctcttcaggtacagctcaagggaaatacgaagcttcagatcttcgttcagggcattgaaatgtgtctcgaacggtcttgccgctgctccacctgcgttctgtacaagcattggagtctcaacttccatgaatccttctccgcttaaatacttgcggatcgcactgagaatcttggaacgcttgataaaggtatctttagactctgtattcatgatcaggtctacatatctctgacggtaacgtgcatctacatctgtcagaccgtggaacttctccgggaggatctgtaagctcttggagaggagtgtcaccttctctgcatggatagaaatctcacctgttcttgttctgaaagcaaatccttccactccgaagatatcaccgatatccgattttttaaaatcagcgtaagactctgttccgatcgcatctcttgcaacgtatacctggatgcttccctgtaaatcctggatattgcagaaagaggccttgcccatgactctcttaaacatcatacgtcctgcaattgccacatggatcgggtttgcgtccatgatatttcttctctcttcgtaatcctttttaagagcttctttcgcctgctcctcatccattccctctacgttcggctcctggcggtcttttaacagctcagtctcatgtgcctcgtaaagacctttcacctcaagcgaatgatgtgtctgatcgaactttgtaatctggaacgggtctcttccgttctgctgcagctctgcaagtttctcgcggcgaaccttcagtaagtggttaatgtcctgttcctgtgtctgctgtgccaatctcttcactcccttttctttgtattttttagatatttctctggatagaaagtactttgtactgcataattccggccggtgtttctacatcgacaatatcatccttgtgcgcgccgatcagagcttttcctaccggagactcgttggaaatttttccttccaggctatttgcctcggtggaaccaacgatctggaactcgatttcctcgtcatactccagatccagtacgtctactttacatccgatattgatcttatcagaatctacttcgtcctcaacaacaacctctgcgtttttcaggattttttcgatctcttcaattcttgcctcgatatcacgctgctcatcttttgctgcatcgtactcggcgttctcggaaaggtctccctgctctcttgcttctttgattttaccggcaatttctctacgtttgtttactttgagatcatgaagctcgtcctccagttttttcaggccggcataggtaagaatcgtttttttctgttccattttatacaccctttctatcgtttctgtatccagtcatatctgattttattctgtaaactctccggaaatgcgctgtattttcagtattcccggttgaaataaggatagactccgcctatcctaacaattaaagtagtataaaggattgcccacggaatgtcaagaaaaaaagaaacgcaggaaagattttctttttcacaaatccttcctgcatctttctcttatttttcctttatttttcggatgagcttcctgtcagtgctttctttttccaatttccttttttatagaaaatcagcgtcagaagcgcacccatgcaccagcttaccagcatggaaatccagagtacctgatatcgtccgtttggcagctccggcgttctggtcagaaaggccagaccgtatgccagtggcacacggattacaacggtaacaaccatcgaaatccacatcggggtcatcgtatcgcctgctccacgcatgacgccggaaagcgactgtgttattgccatggcaatatagccgaccgcaaggatcttcatcatattggcacttaatgttacgagctctgtggtattcgtaaagattcccatcagatgatggccgaaaataacaattaaaagggtaatggtcgttgaggttccgactgcaatcagtgttccctgttttgcgccctgctctacgcggtccatacggcgtgcaccgacattctgaccggcatacgttgtcatcgcggtaccaaacgaaaagttcggcatcattgcaaagccatcgacacgcatgatgataacattcgcggcgataaccatttcaccgaagctgttggtcagcgactgtacgataaccatcgccatggagaagatcgcctgggtaataccggacggcagaccaaggcggataatttccatcgaatactgttttttcattttcaggtatttgggtctgaaatcaaaaatgtcggtcatacgcatcagacgccacatgcagagtactgcagaaattgcctgcgcaatcacggtcgcgtatgcaactccggcaacgcccatgtggaactgggaaacgaatacaatatccaatacaatgttgatgaccgttgccaccagcagataaatcagcgccgaaatcgaatcgccgagtccgcgaaggataccacatagaatgttatagtacgcactgccggcacagcccaccatcaggatcaccagatacgaggtacaccagtcgatgatagaatccggtgttttcagcatttccagcagcggtcttgagaggacggctcccagaatcataataatgatggaagaaattgctgtcagcgtgacgcagtttccgatcgtcatcgaaagctcttttctttgtcttgctccaaaatactgcgacaccatgacgccggcgccgacagaaattccgacgaacagaaccagaagcaggtttaagatcgggctggcgcttccgactgccgcaagcgcgttgtccccgacatattttccgatcacaatactgtcaactgtgttgtagagctgctgggcaatgttgccgatcagcatagggattgtaaaagctacaatcttttcccacggctttcccaccgtcatgtcggacggtgcgaaaagttctttgatagtcatacactacactccctcttttgtttttttattcccaatacctctaaatgtcagtatagcatagaaaaagtacccgtgatatatcaatattggcatatcataggtacttttttgacttattttacttacttgtcagccgcgttcccactcattcagcatctgttccagctcctgcaggctctccacctggttgatcgctgcgcgcagtttcgccgagtgcgggaatcccgccgtgtaccacgcaacgtgcttccgcatctcgcggatgccgatcgcgccgcctttgtattccacctgcatgcgcgcatggcgaagcatcatctcttttacctcatgctgcgtcggctttgcaagtgtttctccggtttccctgtaatgaagaatctgtttaaaaatccacggatttccttccgcgccgcggccaatcataatgccatcgcagcccgtctgttcaaccagcgcttcggcgctcgccgcatcaaccacatcgccatttccgatgaccggaatcgaaaccgcttcttttacctgacggatgatatcccagtctgcttttccggaatagaactgtgcccgcgttcttccatgcaccgcaatcgcagccacaccgcagtcctcgagaatctttgcaatctccacagcattcgccgactcttcgttaaatccctttcgaattttaactgtcaccggctttttcactgcctttaccataccggtcacaatcttccgcaccagcgcaggatccttcatcagcgcggagccctcgccgttgttgacgaccttcggcaccgggcagcccatgttaaaatccagaatgtcaaacggccgctcctcgatctgtgcggcaatctgcgccagaatttccggatcactgccaaaaagctggagcgatacaggatgttcacccggatgaatcgtcatcagatcctcggtatttttgttcttatacagaatcgccttcgcgctgaccatctccatacagatcaggcctgctccctgctccttgcagagaacgcggaacggcagatccgtcacacctgccatcggtgcgagcacgagcggattttgcatttccacatttccgattttcagcggagacatcgtctggagcgtacgtttcttactttccatccggcttctctccgtcttcttctgcgaacgcttcctccggcacttcctcgccgaggaagaaaacgcggtaatacagctccagagattccagcagatcctttttctcctcctgatactgcttgatccgcagcgcaccgccgatctcatcgtacatcgcatccgcatctacagcctctgtttcgaactgcagactgccgtcactgtcaaaccacatggtgaaaatgccgccgatttccacggtgaacataacgcacatgatatgaagctcatcctgcacggactgcggcagggatgcaaaatcctggttaaaataatatttctgctcatacgcactcgctccgcagagcactactttttcatcatctgaatacatatattttcctttcctgatccaagttttttatacataactgtacaggccgcgcactgaaacctcgccggaatgcacttccgcgatcgttccatcctcttttctcacacgcagctcacccgtcgacgtgatgccgagcgccacaccctcgaacggctctttcggatccagcacacgcaccggctgatccttatttgcaagtacagcctcataggcttcctgcagcgccgagagatctcccgcctccaggaatttttcgtaattctcctcgaacgcctccagcaccgctgcgactattttcgcccgattgaccggatgccccatttcgatcgccagtgacgtcgcgatctcagcaatttcttccggaaactccgtctggttcacattgattcccgttccaatgacgacataattgatgtaatcgatctgtgcactcatctcggttaagattccgcagagctttttcccgttcagcaccgcatcgttcggccacttaattctcgtgtcgacgccgagcgctctctgtaccccctgcacaacagcaagtcccatcacaatcgtcagcatcggcgctttggccggctcgagatccgggtacagcaggagggacatcgaaacggaagttccctccggcgatttccagactcttccgcggcggccttttccagcggtctgcgtctcggccgttgtcagtgtaccgttcggcgctccttcttccgccaggcgcttcgcccacgtatttgtcgaatctacttcatggctgtaatagaccgtctgtccaacatatttcgtatgcgtgcggctttccagctcgtccttcgtcatcagatccggctcgttcagcagacggtaacctttattctgtaccgcctcgatctcgtatccttcctcttttaactgattcatgatcttccacactgcagtacgggaaattccaaaatgttcacacaaatcctgacccgaaacattttctcctgattctcgcagaaggcgcagtgtctcagctcttttattttccagcatatgatatcttcacactcctcacataaaccaacagcagcgctgcgaaagacgtgctccgcagcgctgctgtacgtgtcttgccattcttctattatacacagtctgttccggtttttccaccagaaagtttatgcaccaagcgttgctgccatcacagctttgatcgtgtgcatgcggttctctgcttcctcgaagactctcgactgtgcggactcaaatacctcatcggtaacttccatctcatccagtccgtaacggtcgtggatctcttttccaatctttgttttcagatcgtggaacgacggcaggcagtgcaggaataccgcggtatccttggcatttgccattgcttcttttgtcacgcggtacggagtcagatcgtggattctctcctcccatacgctgtccggctcacccatggatacccagacatccgtatagataacatcggcgtctttcgttccctcttttacatcctcggtgagggtgatggttgcgccgctctcctttgcatactcttcacactgtgcaacgagttccgcgttcgggaagtatttcttcggtgcgcaggctacaaaatccatacccatttttgcagatgcaatcatcagggaatttcccatgttgtagcgggcgtcgcccatgtaaacgagtttgatgccttttaagtggccgaactcttcctggattgtcagcatatcggcgagcatctgggtcgggtggtactcgttggtcagtccgttccataccgggactttggaatattttgccagctcctctacgatctcctggccgaatccacggtactcaattccctcatacattcctgcaagaacgcgggccgtatctttgatgctctcttttttaccgatctgggaaccggtcgggtcaagataggtggttcccatgccgagatcatgtgcggctacttcgaaggaacagcgggttctggtgctggttttctcgaagatcagcgcaacgtttttaccgcgcagggtgtccaccggaatgcctttctttttcttatccttcagctctgcggacagatccagcagataggaaatctcttccggggtgaaatcctttaatgtcagaaaatcgcgtccttttaaatccatggtgtgttcctccttaaatatatcggtatgtaatgtatttttatcgcttaagatggtttctattatgaaacaggccggcgcatctgtcaaggggtgaaatgtatatttttacgtattttacttgtattattcataatatatgtatttttatacatttttattctgttattcttaccggcaactacagaatctgccagtggcagctccctccggatgcagagcaataaaaaattctcccgtgtccggcatgatgcgtttcacgggagaatcctgcttttttatttctgtccttctttccctgccgggcctttctgctcttccacgattcccttgaatgtggtagccagacttgccagtccctgcagatcggacggaacaacaatcttcgttgcttttccattcgccagaacaccaagtgcctcgagactctttaaggtaagaaccgcatcgtcagcacctgcctctttgatggcacggataccatcggcatttgcctgctgtactttgaggatcgcctccgcctggccttctgcctcgcggattcgtttctctttttctgcctcagcacgaagaatcgctgcctgcttctctgcctctgcatccaggatcgcagactgttttttaccttcggcaaccaggatggtcgattttttctcaccttctgcaatcaggattgcttcacggcgttcacgctctgctttcatctgtttctccatggcttcctgaatggctgccggaggcatgatgtttttcagctcaacacggttgactttaatgccccacgggtcggttgcgatatcgagagctgcctgcatcttcgtgttgataatctcacgggatgtcagtgtttcgtccagctccagatctccgatgatgtttcgaagtgtcgttgcggtcaggttttcaatggccatcagcggatttacaacaccgtatgcgaacagcttcggatcggtaatctggaaaaatacgaccgtatcaatctgcatcgtaacgttatcttttgtaatgaccggctgcggcgggaaatccaccacctgctcttttaagttcacgcggattgccacgcgctcgataaacggaaccttaaaatgaagaccggttgcccaggtgcctttgtattttccaagactctcaacaacgtaagcactggcctgcggcacgatcttcacacacgatgctgcaataaacagtacaatcacaagaagaaaaatcattaaaattcctgcaattcctccaccactcatgtttcatttcctccttctttttctttgacctttacaatcagcttgacgccttccacacggagcacttccaccacggtctctttcgggataatgcctccttcgctttccgttctcgcagtccaggtgtttccgcccagcgatacctttccggtgcctgccaggttggaaatctcttctgcgacgatcccttccattccaatcacgcggtctacatttgtttttaaggtatccttattcaggaaacggacggctacaggacgtgtaaaaatcagaagtatcagcgatacaacaagaaagcagaccatctgaattacaaatccggctccgcacatagctgcgatcagagcaatcagggcgccgcccgcaaaccagatggttgccagacctaacgttgccgcctcaatcaccagcaaaaccacaagcgcaatcagccagtacactgcatattccatgctcctctctcctttccgatttcttggctgttggattcatgatactatatgagaatgaaaatagcaagcggagaggtggaatattcagaaaaaagacaggattttaagaactggtcgcacagagacagcgcagaaaacccgatcttcttattcttccatcacatcttttcattttaaaacggctacaaccattctttacacactcctatctgttgtgatgcagttatagaaacgaagaaatttgtaatgtttaaagcgttcgaaaaagcagattacattttcataacgttttgcacctgtgtgaagtgaaaggaatggctataaaaatgaaaaactggaaaacagctctttcaagaaggaaataaagaaaggaaatataaagactgattttttatttataaactatcaattccaaggcttgacatccatacaaaaacagctgccacaacaaaatacatatgcatctgtataaaaagtaccaaggtaaatgctaataatttccaaaacagcgatttaatctgccttgtataacgaatgcactcttttagtgtcagtttttgttctacaaacgggtttctgctgtattgctttaatatcttcgccgcgacacgaatttttttcccttgatatgtcatttcttctttggcaagatacattgcaccaatgagcagatgaaagaaaatcagatctccatattctctggaaagatgcttttctttcagaaactgttcaaaatcagatgcaatcaaaatccagtttctcatcagattctttttcggttgatatgtcagggactggagattttcacggtaaagaacgatgctctgtgggacaaaagcatatttcggatggcatgcacagcatctaaaattatgtgccttgtcttcggcgtaactgtatgggggaatccacaaatcgtgagactccagaaaagatttgcggtagagttttccccagtcgtaagaaagcgttcctttttgaaaaaatccatgaaaccggaactctgcgctgtccgggttttctttttccagattactgcagcatttcactttttcgccattcgccctccatctgcgatatgttccgatcacaatatctgcctgctctctttctgcccgtgcggcaagggaacgtatggcagatgaatcgtccagcttgtcgtctgcatccaggaagagaagatattttcctgttgcttcttttatccctgcatttctggctgctccactgcctttattattctgatgaatcacacggattcttggatctgctgcagcaagttcctcacacatttgattggaacgatctgttgaaccgtcattcaccaaaacaatctccaactctgaatagtcctgttttcgtacgctctcaacacactccgtcagaaatttttccgcctgatagaccggaataatcacacttaccagtggataaaacatcttttttctttcctcttctcctattctttgtacccaaaatatagcggatttttaaagaaacgtcaactgaactttgctttctttttgttttcatttacaaatgtctcagcgtattgattcctccattattctataaaacaagctatttctcatccactctttacaccacagtatatgttgtgctaaagttataaaagggtcaaacatttgcacacccattcctatttttcctgaaaacatttttcggatatattctgcacgttggacattactggcagtattcctacttagcagttgcatcaatatatggctttggcgaacagatcataaaaaaatacgttttatctgtctggatgcttttgtcatgttgttaatcatgaatcttggaaatggatatatccattattaccagatgctatcttaaataaaataccagaaaatgagcggtccagtgtatataattatgagacaagttcccaatggctgctgtctggacttgaaccttatgacaaatactgtattacagcagaccatttttcgatgctttcaaatgaaatttttcagcatattcaaaatttattcgagcacagagagcctatgtacatagtaacagggcgcaatgtgcagattcaaaaccaaattgtacaaacatatctggaaaaagattatactgaattgtataccaacaacatttatacattatatcaaaaaattccttaaacactaaataaatcgttctcactattaaagtaaagaaaaaaatatatcaacttctacaaagaaaattgaacaactttgacaatgtaaactgattttttgtactgtttcgttatcgaaagtatactgttttttttggtacaatatacgaaaggatcgttacaaatgaaaaaacagatcattgattttgtcatcacatgggtggacggatcagaccccttatggtttcgccaaaaacagaacgccaaaaaaaagcaaggagtttctgttgatatcgacgaccgtattgaacgctatcgcgactgggaaattctaaagtatctatttcgttcgatagaaaactttgctccatgggtaaataacgtatattttgtaacatgcggtcatctgccggcgtggctcaatacagaatgtccaaaattgcagattgtttcacacaaagattttattcccgaaaaatatctccccacctttaactcgcattccattgagtggaatttccaccggataaaaaatctgtcggaacactttgtttattttaatgatgatatgtttttgctgcatccaataaagccaaccgatttttttgaaaacggaaaacccgttgatatgcttgccctgcagcccgatgttgcaaacgtagaagataccattatgccatatatctatctgaacaatactatgctgcttgccaagtactttgacaaacgggaaaacatgaaaaagcagccaggtgcctattttcacatcggatatcctcccatgtactttggatataatcttctggaaatggcatttccacgatttaccggtttttacaccgttcatggcccgtctcctttgaaaaaggagacttatcgtttcttctgggaaaaggaagaagaattgttagacggtgtctgcagccacccatttcgtcataaagatgatgtgagccaatatgttctgcgggaatatcagaaactgagtggtgatttcgttccaagaaacacgcacaagttctgtaaatacttcaatttaaaaccggaaaacccggaactggtaaagacaatcacaaagcagactgcaaagtgcatctgcatcaatgacagcaattttgaaatcccatatgaacatgtaaaacgggaactgaacgatgccttttccaaactttttccgcagaaatcacagtttgaaaagtaaattttgttccatattcagaggcggaaatttatctgcatctattttggcattacgttatcggaacgttcttgttttttaatcgaaatagtaacatttttaccccaaatctattgacatttgcgggattttcctcctataataagaattgtaaccaaggatgattttgcaagaaaaggacgtgaatatatatgactaaaaattacacaaaaccaatcgttacaattgattctggtatggcagaaggtgtttatgcggcaagtggtgcaacaaaaggaactctgaacgttacttattatggcgtatgggatcgttggggcacaaatggtggtaaaggacttgcacaggcaagctggtctgatctggatggaaccatcacattgaatattaatttcaatgatactgttgattcaatcgagacagatgatgcctccgtacagaaatcctggtctggaaaaactgccaccctcacttttgcaagcacagcaaccaatccgctgaccattggtattcatctgaaccatggaaccagcatcgacgatctgcagctcactggatttgactactcagtgaactaaaaaatgaaccatgtatgtaaaccatatcttttcgcttcgtttgaaaagatatggttcacagaaaaaagcagccagaatggccgcggaaggggtgcagaaaatgagtaaatatgtaaaacctgtaatttctctggatgaaggaatggctgaaggtgtttatgcggcaagtggatgttatactgcatctgcatatattcaccagactccagaaaacggacgtggcgattaccgtattcaggtaaatggaaagcataatgctgatcataccaaggaagcccaggttctgactatcagtttcaaccagaatgttacttatgtttctggcggcgcaggacttatttccggtaacgaaaccactacactgaaagtaaaactggcttatcatcagaatccaaccgataatatcggtttcggtgacttggttgttactttcgatgcaggtcttgcaattactggagtaagcattaccgattaatggatcacttcccgtattctaaaaaatggaatgccttttggcattccattttttattcgcttgtaacctgtttttacaaattcggctccaaattttgcaggtactttcaattctgcaactttcttcaattttagaaatccttctccatctccaaaatttctttctcgcccagctcctcacacttctttcctcgaatcgcatacactctcgtacagattccaagcaccgtcggccggtgtgtcgttacaatgcaggttcgcggatacgtatctgtcataatatttttcagcactttccgttccgtcgccacatcgagcgccgaagttgcttcatccagcagcaaaatcggagattttcgaagcagtgcacgcgcaatcgaaagccgctgtgcctgtccttctgagaatccgccgccgcgttctttcaccatactttcaataccatccggcagtttctccacaaattcccatgcacatgccagtttcaacgcctccacgatctcttcatctgtggcttccggtttcacatttcgcatattttctgcaattgttcctgaaaacatcgtattcccctgtggcacataagaaaacaatttccttgtggacggcgacagtgcaatccgttgttctctgtcttcccctgcaccaatccatgcttctcccccctgggcacgcagcaaggataagatcagccgcagcatcgttgtctttccctcgccggacgggccgacgagtgcaataatttcatgcggccacgcttccagtgatgctttcgaaaacacttctgttcccgtatggtaggtatagctcaagtcctccatagcaagcccgatgccgcttgcccggtatttttctgcaaactgctccacttcccgatccgcactgtagtcctcctgcggcatctccacaatatccatcagacggccggctgagatgccaagagaaatcgccgatggcacaaggctgaccagcgaattgacggaacccgtcagtgtaccggacagagacagaaacatggtcatggttccgtaagaaattgccccgctccagacacggtaaattccccatccgtagcagctgtaagatacaagatagctgattaacgtcatcagaagcgaggttgcaatcgacattttctggaaatccaggcgcattttgatgtattcctgctgcagatttttcaggcgatcgacataaaagcggatcatatcgaatgccttgattgtctgaatattggaaaatgcttcctgattaaatccgtaaagtttcgcactcatctgtgcgctccgctggttattgttcgtcatccggcgcagcagcgggcgggacagaagcgcactgaacgggatgccaagcaatgcaaaaatggcaaaggtgggatcataatgtaccacaatcgccaatgcactgataaatttcacagtatagatcacaagattcggcagccagttcaggataccactggaaatatttgaagcatcagaactccaccgtgttaccagatctccggtatgatacgctgtcagcgattcccagtccgtgaccagaatcttggcaaaaatatcattctggatttcgcggtctaccttcaggttaatcatcgtagatgcatacgcagatgcctgcgaaatcagggtatttccaaaagaaaagccgatcatcagtgcgaaggtctgcaaaagttttcctgtctggtgcccggtgataatatcaaccagatctttcgatatcacactggacgcaagagaaacaccggttccgaaaacaccaagtgcggtatagaaaatcatggctttccagtatcgtctggcatactgtgcaatccacagaaattctttccacatcttctgaagcatttccgcctggaggcatttttttatttttgtccacaagttgctcattttaaagcctcctgcgcaagttcatcctccgtgattctgtgatgcatcacttctgccgctgtatcatttttcgtacagcgcaggaagtaaaccggcttttcatttgcaatttcttccgcaaaagcaagattctttttcatcagccctgccgtccagggcggcgagatcatccgctgcatcacacggagtgttttctgctctttcgtcagggaaacgattttatcctccggcgctttttccagcagcacaatccctcccagctctttcttttcgactgtgaaaatttctgatgtgccgcaccacgggattccgtatactacaaactgatcgccctcttttcctatgaggttcagatctccgttcagaaacggcgtgtcaaacagttttttccaaagtgccgtatgagtcgattttcccattcccgacggaccggaaaacagccatgctttttccagataaagaagagatgcggaatgcagcacaaacatgccttttttctgtgccaggaacagaaataccggccggatcgccagaaagagggaatcctgctcttcttctgtcataggcagacggtaataaatacaggcgaagcttccatccgcttccatccagatttcatagatatttttaagagccgggaaccagaggacatagccttcttcccacgcgcagactgtcagatctttattccggatcagaatgtttccattctggtggctttccggtacatgctcgatcaattctaacgtgagatccgccgcatcctgcctattttctgtttttatcaccgtttcttccacttctttttctcctgtttttttcgctgcctctccttctgttttctctgttgcttcttcctttcctcttttcttctcaaaagaagcaaactgttttggaatgcagccctcttttccataaacagcaatggaaattcctgcgatcttcaattctccggcgcaagttccatccggagaaccaagttcccgtcgtaccgcaccaaaggcaagaagctccttcacaaaagcctgaatatcttttttcagttcctcctgctcttcttccggcacttcataacagcgaatcattttctgctgaagttcttccattgtttttggtgtttccagcgcttcccagagaatccgtgcggtctcattcagctccattcctcgctgctggtctgctattttctgcccataaggcagaagataatgtgtgttcccgattttctgcagtaaatatccttcctgccttctgattctcataatctgatttcccttcctgtgtttgttttcttatatttgctgtctttcgttttgtatgtaaagttatgctttttctgctcatcatcctttttattttcagggtaagctgttataataaaattcaggtaactattcagagccactcgtcaaaatgccacgcatttcgtcggttcggcgtatccgccaaatggagttttttatgtacacttacgatattgaacaacttttaaaaaacggttctgccgtcaaactgaaaccgcagggctacagtatgtatcctctttttcttccgggccgggacgaagctgtcattgaacactgtgttccttccgaacttcatcgcggcgatgtaattctgtatcgccgtgtgcagggaatccttgttctgcaccgcatctgccgaattaccagggatggcttctatctggtcggggacaatcagaccgaagtggaaggacctctttccccggagcagattcatggaaaactgactggtgtcgtacgcaatggaaaatcgttttctgtttcgcatccaatttatcggatgctttcttccatctggctctttttacgccctgtccgcccgtttttctggtcggtaacggcttttttccgcaggttttttcagaagcactgattttttcattgtcctctccgaatttttttcaaaatgcacagagaaatttctattgcatcaggcttttcgcattcccttcaccatggttacaatgctctgaagtctccagcctcttccaaagatcaccagatccagcagcagcggaatcgcaatacacaggagaaagcagacgcagaacagaagcataccgcctgctccgtatatcagtggtacgattttctgcatcagcagaacttcgcccgctatgactgccagatactctccgatatcctgcgcataccgcagcgcctctcccggcatctcgaggaaatcccggaaataaatgatataccgatacaagatctgcagcagataagacagtaaggttccaagcagaacgcctgccatcccatacggttttacaagtgccagtgacacgatcagattaagaagtgcggaggatgctccgacatttttctctttttcaaacagtcccgtcacgcccatcacaaggctgagcggcaatcccataattcgaaccagcaatactacaatacaaaaaacagtaattccccagccaagttcgtaggaaggaccaagccagatatcacggacaaatggtgtaatcagagaaaacaggccaaccgatacaaccgacgcaatgcagaaaaagccaaaggtcaattgccgcagaatctcataatttctctgacgatttttttctgtaaaataatctccgaccgtcggctggatcgtattcgcaaggatcgtgagaatattgctgatcgcctgcgtaatcatacagtaatttgcatatcgtcctaccgtaccgaccccgataaaaccggaaataatcaggttgtccgtgcaatacagcattttttctgaaattctggaaataaacaggcttttcagatctcttacaattcttttcgtcagagacgatgtgctcttttcttttctccgctggcgcaaaaacggatatttctgctccacataccagctgatccagatattcagcacgacttccgttacggttccaataccaagcgccagcagataattctgttcccatgtaaccagcagaataatcgccagatagctgaccacatttaaaatcagtccggtgatgcttgcaatgtattctttctgatccgcaatcagcaacgacttccggtacgttaaaagataagaaagaacggttcgaaccagccacatcgcatacagaacgcggatataggataacgaataactgttatttttcataaaaaggtggatgaacggcagaaccgccattcccgccgcaaatacaagaacagcaaagacgtgatatgcctttcggtaaagattcatcagcgatgcaatctctgcctcatcctttcttgcaagcgcgccatacaaatggtaaacgattgccgtggatatgccaagctccgtcacggaaaggatattgatgacattggaaataacaccattcattccaaccagctccgcgcccatgtacaggttcatggcacgctggctgaaaaagccgaggatcagaagcgcaaactgtgaaagcatactgaaaaaactgtttcggaataaatttttaatgcgcataagttcctccttcttctcgtttttataacatgctacgcgggtaaacagttccgtaattttacatcactcttattttccactgttttcatggattttgtaacattaaaatggtatcatatatctaatacctgctatcgttgctgccgtttccagatacctgtgaatggcagtatcccttttggaaaggctttcctttatgaaaacaaatagaaaaaaatcattttcttatcttctgttttttcttctgcttctggtattccttgcactgttcgcatttcttggtatccgttctttttatcgtgcgaattacatgccggaaccatgcacagaatccgcagacgagttatccaatccatacattggattttatcacatgtatggctatgttcttggaagcgattcgctctcgaatcttcctgccgcctctgattccgacgccaaaaacaggcagggaattgtcatgctggaagtgaatctgcagaatttttcaaacgaagatctctccgattcagctctttcccagcttgataccattctctctgcctggcagagacatggcagtcaggtgatcttacgttttctctacgactgggatggaaaagcaatggaaacagagccgcaaagtctggagcaaattctgcgtcacatggaccagacagctgaagttgtaaatcgctacacggactgtgtttttctgatgcagggcatttttgtcggaaactgcggggaaatgaacaattctcactacatgtccgatgaggactgtactaccctgatgcaccatctggcagaggtaacggatccttcggtttttctgtctgtccgcacaccggtacagaggcggaaaattctggattcctccgaacggccgacaaaggaaacagcttttgatggttcgctttcctcccggcttggactgtttaacgatggtatgctcggaacggccaacgataccggcacttatggtgataccgctgcctccgcagacacttaccgttccgcctgggttcgtgaggatgagctttccttccagaatgaactctgcaatttcgtcccaaacggcggcgaggtcactctggataacccattgaatgatctcgcacatgccattcaggatttatcgcgcatgcatgtctcctatctgaattcggaacacgatcccgcggttctggataaatggaaagcagctgcttacaaagacaaagcttccgtttttaacggattgtccggctatgattatatcgagcgtcatctgggataccgctatgtcatccaggacactgctttggattcgtctgattttcagatacggctggaaaatgttggtttttctgtctgctatcgaaaactggatttacagctcaccctggtttcttccgatggtgaggttttctcatttcccatctcttcggattccagattctggataccggggactactgcagagctctctatttctctcccgcttgcgagactcgccaaaggcagttatacggtatatttccagatgacggatcctgttctgcaaagggaaattttgcccgcaaacacattttctcatgatacgcatggattttcgattggtacgctcgaaatcagcaaattatattaaaacaatcgggtcaattttgaaaattcccaaaaaggggcgtccctgtttttctccctgattggcaaatgaaatagttcttccatcccgcctgcggtacagcgccagatacagtttctgttcttctggttctgctaattccgcaggcagttttattttctggcaaagagtggttttttctccgctcttccagagtctcgcatctgttgcaatctgtatttttttctgaagcgttccgtttctttccagctccagataacagtctgcctcttcggtcagttctgcaaatcctttgttttccagtgtaatctgaagttcttccctttccgaaacaaactccacaccttccacaacaaaccgatagccgagacgttttccaattgcctccaggccgctttcgtcctcgaccgtttctgctttccattgttccagccgtcgtaaatcatacgtactgttcagataggaaatatgcattctttcgagatccgccattgcttttggggccgagacgaaaggagccggttctgccccacttccccatatggcctctccgccgcaaaattttccgcacatttcgtttttctgccattccagttcttcttcccggctgcagattttctgtcccggtgtttccggtgacagtgtgccatacgttccaagatccgtttccgatccgaatatcccatcgttaaacagagtcagttttttcttttcctgctccgtccatcccaaagtcagttcccgccactgcgccggtttccgcactgcaaccgggcaggcgccgtccactgcttttatcatggtatcggtcagggttcgaaaggcatccggggtcagataacgggaaccgtgcatttcgccccagttcccgatcagaattccctgtactgcaaaaatatcgtccgcatattcccgaatgacttctccgatctgctgcatatgttcttccaccagacggatactgcccggctctttctccagtccttttccctcaagatcataggaaaaccgcaggatcattccttttcttttctcccgaaaaaatgccagaatccttcgaatccattccagagacggttctgaaatcggcttgtcccagaatgctccgatatcaattctgagaaggacaagttcttcctcttcacaggcgatgtagagcggttccccggtttgcgccgcgttgaaagtatataaatgataccagccacacccgggattctgtatcgctttcctgctttcctgaagtatcgctttctggaaaagctcttttttatcctgttttccccgcagttctggaaattctttcttttctgccctgcctttagcttctcttcccttctgccagctcaggatactttttatcttctctctccacatcaatccgtcctgctcctgcatccattttcaataccttacaccggaaaatcacagccaggacactgtaaaacatccgcatcatataccagattggcttcaaaccagaatgcatgcttttccccgaagtccgagcatgcataacagctggaatctccacaactttaaaatcaagaagcagcatctgagtaatcatattagtatccggatatttatcatcgaaatgattatatttggaatagtataaaacagctttccggcttaaaccctgcagtccggttgtcggatccgcaattttccgtccagttgccaaatacagcatttttcgaaacaggacaaatgccattttttttgcaaaggaaacttcaaactctgtactccccttcatgaaacgggatccaagcacaatgtccggcgttcttccatcatcatctttttcctttaatctctggtaaattttcgggatattgcacacatcgtgctgcccatccgcatccatctgaataacataagaatagccccttcggattgcatatttatatccaagctgcagcccactgccatatcccagattaaaaacatgagtaaccaccgcacagccatattccttcgccagccagttggtattgtcagaagaagcatcgttcatgaccagcacatcaacaatatctgctatctccggctgcgccagctgtttcatgaccttttctatatttttttcctcgttgtatgccggaataatcagcagtacctctttttgtctcatatgtatgtccgcctcatttcattagattcagcagtttccagatttcctctgtctgaccgttcattttctgttttgccgctgctgcaagccgttcccgtttcttcggatcatccagcagttcttctactttttcggcaatgccttccggtgtcagcgtacagagaagaccatcttccccgtccacaatctgctctctgtttcccgcacagtccgatgcaatcacagcacagccaagtgtctgcgcttcctggatggcgatgctttttccttcaaaccgtgttgcatgaacgtagagatcacactgtgcataataaggaaacagattctcttttgcacccggcagctggaaatcttcctgcaggccaagctctgcaatctgcttttcgagcgcatttctctcggatccctctcccagtacataccatcgcgcctcatagccatcttcgcggatctttttcatggccggaattgcgatgtcatatgctttctgataggccagtcttccgacagttaagattcgaattcctgtataggaatctgaaaaaccgcccggcagctgcgcctcacgcgcaatccggtctgtatcgagaatattgtgaaaaacctgcactttcttctcatattccggataaaattccagaaaatgacggcgcgtctcctgcgaaacggtaaagatctgatccatcttttcgtagcagtcccgatccatttcccttgtataaccggaattgccgtatgcaatatggacaaaggcagcttttttcttagcattcacatgatcggcaacgtaataagcagaaccgccttccaggtaagcaaccgccagatcgaaggtttccgaaaatcggtctgctccatccgaaattacacgccagagcagcttgtccggctgaatgtttccagtttttttcattcggaaaaaattttgtatcacatattgcattttctttatggtgcgaccatggcggaaaaacgccagaaaagatgtctgtatcagttttctccgccccgcaccggacagcacagaagcggtacagattttcttatttttcacatgtaccctctgcggtacctgggaaatcatttcaccctgccccaaaagtacgtaaagtgaaatttcatattcctccgcatccaggcggcgcaaaagttccagcagcgctgtttccgctcccgcccggccaagggtgttgatcacaaacaaaattttcttcattcgttcttccttcttctattcccttataactctcttgcatttttgcccgtcagtttttccagttctctcagaattctttcattctcctggttcaaaagagaaaccagaatcgccagttcctggtttttcattaacagggaagagatctgaattgtcatctggtaaacgccccacagaaccagaagcgctgtgatcagaagaacaacgaggctcccaagcccgatccggctgctccatccggaaaatctcggaaccgctccgcttaagattgctgcaattccaagcagttcccaggtaactgccaggtttacggtcagcttctttttcgcatgaagcacgaaggtaacgatcataattccaattcccatcaaaataacgcaagcttttacaattgctgctgtgctcatttacgcttcctccttctgctcttgctctgcttttctttcataaaccataccggatggccgtttcccctttccctgaggaatcagatttccacggcaaaagacatgtctgtccatgtttttttctacccatcgcagtctcgcatatgccacactccatcctgcaaatgctcctgctatgaccccggcgccataccagatcaccggtaaatgtgttgcaatcagactgccaatccatgtcaccaggcaaaacacgatcgctgtccagattgcccctgtcagatcgtcaaaataatacaggaagataatttccgcatacatcagaaacagaataaaatatccaaccgcaagtgacggataaattttcagtgtcataccggaaaatccctcccctggtagcagaataacacagatcagataaaccacaacagaaatgataaactgtaaccgcgccagtgtcatcagttcactggaaagctgacggaacatccgtttcttcgcattgtcaatatcggcgccttttccgccgatgactgcctccgagtacagtttatatttttcgtgaaagttcatctccacacgcgcaataaagatgatcgttgcggaaatgttggtaaacatggcgagacaggatgccatatcgtatggctggttacatacgaaactttttgcaatctccatccgcatatccgttgtccagaacacaaaattgtgaatgtataacccaaggatatacaaaaagtttgtaaaaatcaatttccaatatttcctaaaatactgcagtaccggccggtaatgattgctatttcgcacaaaataccggcggatcagcgcattttccagcgttgccgtcacaaaaaatccgatcgtcagagaaaacagcatactccatgttgtctcccacttcagaataaagtgtaaaatcagggcaaggacaaatgccaccagcatgccgaagaaaaaatactgtgaaatccgttgataatctttgcaaatagaaagataaatcatcgagtaaaaaacaagcaccagactgatataaccgcaaaagccacagaatacatatgcggttggtacctttcccacaaaatgttcccagagacagaacggaatccccaacagacagctgagaccaatgttcagaagcataccaatatgatagcagggtaaaatatcctgataccgctcttcgtagatcacatcagacatatagcgggacagcaccgcattaaacggggacgccgtcagaagagaaaagataaaggtataaagaatcgtgcaggaaaacagctctcttgtcacatatcccacactggcaaaatccagcagatattccattaaaatcagattgataatgatgacaaacatgggcgcaaccgtcactacggtgctgtagaaaaatccaaccagatttgtcgtaagtgtatttttttcaaaaatccgattcagccgaactccgattcctgccatatcctcttcctccttttttgtgcctgctccggttttacttttccttatccggcagttttaccgattcttccttccactccagccccatctgttctgcgaaatcccggtaaatctcccagtatgttttctgcatatattctactctatatttctccatcacacggcgatagccggtctctcccatttccaggcgcattttttcatttgccgccatatccagcatcgcctgcgcgatttcttcaatattcatgatatgcgtgacaattccggccgcaccgaaatcatcactttccccgtaaatcagtccatagcagtttccgacatccgttgcaatcaccggcttatgcgccgcatagctttccagaatggtcagcggctgtccctcacttatgctggtcagaatggtcacatccattcttccaagataatcgcggatattgattcttccggtaaaaacaacatccgggatttccatatccgagacaagctggaaacactcctcggcatattcccggtcttcttcccatggtcccataatccagagtttcagacggtcatctttttctttcgcaaaaccaaatgcctgaatcatcgttttgacatctttaatcggggtcacacgcagtaccgcaccgatgttgatttttccttcatcttcttccgttttccccggaatattctgcagattttccacacggattccgtttggcgtgaccatggttttttcgatcgggcagccaagttcgatctgcagttcccgtgcatgttcaaacagtgatgtaatgagcgtcccttcgttgtacgccagctttgacatttttcgaaactgatcgatccagatatttttatagattccttctacccatttggctttgatcagttcttcttcccgctctctggtgtaaattccgtgctcagaaatcaggagacggctgccgtagaagtgttttgccatggcaccaagaacccccgcataaccggttgcaacacagtggtacaaatcggcacgcggtatttccgtctgcatggtgagaaacagcggcagataaatcgaacgcatcgtccacaggaaatcagaaaagacaatctgactgtatttcagattatagcagtctctgaccgcattcagaaaatcctcccccatcagcagcgcattcagggaaacattttctttctggaaaaggtcaaacaaaacatcccactcgatgtcctgatccagaatcagactgcgcagtgcctgatactgttcttttttcagccgttttctgtgcagtttcttgctgccgctccagtccacatcgtcaagataaagttcatagaccgcagacacatttttcggcaattcataggcatattttccccgctgggaacgatttgccgcaattgcaagaatcacaaattccgtttccggaaacagctggatcaggctgtgtacccagcttgaaacacctcctacgacgaaagggtagcatccttccgcaacaatgcagactctcattcgtttttcgcccctttctcatagtaataccgttgatccgatgctccaagcgtaatccttacctcactttgctctgcgcgaatcagccacgcggaatcttcaagtttttctgctgttccgcctgtaacttttctgacatcttcattgtgcgtgcgaagaacataatacgctgtttcatcggttcctgttgtccttaatgtgatggcattgtcttctctgtcatcttcataacgggaattcagaaatgtccggattctggtgtcacattccgatacggtcgtgccgtcaaaaccggagaatagcttccagtacgtagaaagattcgccgcaaattccttgccgatattttcccagcgatcctcttctgttttcggataaagaatagcatccaaatccagcagaacactggtatatccaagtgcagattccacactctttactttcatccaggaacggtatgtaaattgctcctcttcttccgatatcactttctggcttgtaacctgatcgttctgatatcttacaatatccccctcggtatccttggcttttacaaccgtacgaatctgttcaagaacaggctgctgcaatgctttttccatttcttcatccgtctgttctccagcgtaaaaagaagaaaaagcaaacgtattcaattttttttgcatgaactcctgatcttcctgcagtttctgtatcacatccgtttctgactcacaagtaccggaaagccctgtttcccctttttgctcattaatcagtttcacataatagttcagcatactgccatctggttttgttgtactgctgtaatcaagcttcggcgccagcatacaggtcagtccgagatgattcttttcataaacagaagcaaaagagggccagatgatatcacggttaacagctgttgctgtgttgccgtaaatctcctgcatctgtgctgtattttcctctgtcagaaccggaaaattagcagcaatcagattctgtgcatttacgaccgggtaaatcagataatctcttgtctcgtaaagcattccggtcaggattccaagtcccgtttcatcctccatataatctccgtttactgcaaaaacataggcatttcccgtactttttcgccagattgcaacgggatgttcctgcacttttaaggtactgtcttccggaatacctttcatataagctttcgtaccacctgccagtttaaaccacggaaaagtcagttcaagatcctgcatctttttctcttcctgtttcttcgcctcataaatgttttctccgccaagcatcagattcgcatacaaatccattcccttcaccgttacctgatctgctgtaatttttttgatgccaagcaattccatgaatttctgattcttttttatcacagaaacatcaggcagatttgcaaatacaagatgaatcccctgttctgtacatttttgcagttccacggtatcctttacggttgtccagtctatattttccgaattcacaatcaccatttccggcagcctggtatcttttttctccattgctttctcatattttgttatcgatgaatagactgctgactcatatttcatataccggcaccattcctgaacaacggtaccgatagagtcgctcttttctgctccgatataaacaatggttcccctgctgccctctatgttaatctgatcggaagcatccactgctccaaatgctccgcttccatccgctaacgtttctttatccttcgcatatgcatttgtatcgtaatagttcagcttttctcttgccacattcaatccctggaacaagaaaagaacgatcgccataatgattgtaattgctacaaaatttctacgcgaaaccatctctattcttcctcgcttcctgcctttggcgttggattgttatatccgtaatcaattgcaaaattgtacggactgtttacgttctgctgtacacgataacaaataaaactgtctgtttcataatagacttccatctcgtctggataaagttctttaaatttctgtgtccagtaataaatatggcacatcgtataccaccggttttctgcaaaatacggttcaattccgcctgctgacggaaggggtgcttctgctccctccacggttacttctttgtggttggtacttcccgcataatcaattggaattttttccacaaaaaaatatacattctgtgtcggcataatgatctccggatttttttccagatcctgcagttcacgcagaaaagtaatggtctcataatggtagccgtaaaactccgtcattcgaagttcatcatcggcagagcagatggtccaggtgaaattcctgttttcttttaaaatattggtaacgcaggcaatcgctccattatcttccagagcgtctacaacaatcggctttctcagaagaccatttgatatcacagcagaaaccgctatgactaaagtaaggatagatgcaacattgctgacccatcttttcttccaccatcgtatcaggagatgtacgatggcatctgctcccagcgtccatgaaaaacaaaccgaatagcaaaggaaaatgctgcagcggtttggatccatcaatgccggcaaatgcagcagggatgcacattgcagacagcacatacagagcagataaaaggcagtggaaaaaatcactcccgcaaaatcaatctcccgtaaaagcaccatcaaacttccaagcgcagccaaaagcacaatacttcccagggtaatttccacaatatatggttttacattcatcacatttacgcgaatgctgcttcgaactgctgcaaatttttcttttaaacgttcctttaatggcttctgctgctccttcgcttgttctgccagtttctcttcagccgcttttttcagcgcctcgacctgtgatgcactgactgttgagccgccatccctgttttctgtcccctcactttccgaaatggtgctcagctctgtattttccaccagagaatctgtcgcttccgtttcatcatcctttcctccattgataacacttaatccccagtacagggatccctgcagtccttttcccatcgcaacacccgccgccatgggcagtacagaaagcagcacactcaggattcccgttgccataattctgcggaaatacttccaccgggcaaaccggaaacaaaagccgactgcaacaccaatgcaaaacagcccggcgatcatcgtgctgtaaaagtggatcgtcagcgtaagcgaaaatccaatggcaaactggatcagataccaacggcagttttgatccagttcttttttttcattctcttctgccttctgctcttttgcaaattcctgaaaaaaacggatcgccatgcagacagacgtcagaataaagatcatactgaattcctgcggcagcgcaccttcaaatcttgcatacgtattccggttaaaaatatccatcacatagaacagcacgccaagatatggagtaaatcttcccttgcacaccattttcagcgccacaaccattgccagatatacaaaatatgtctgcactacgccaaagatccgcagcaagacatacgttttgatcccaaacaccatatgcagataataaatcacgatgtgaaatccatacgggtacacacctgcaacccagatgttgttccgatccagctcattgatccagtagttgtgtaccgggatatcactggctttataaccgtaagcttcgatcatattcggcccatagacatacgtaattgccgcaatcgcggcccccatcacagcaagctccagcagcacattcagccattgctttctttttccacggaaaaaccgcctgtaaatggtccctcgcagctgcacaagcgaagttttctttccacgttctccactcagcagacgctctacattctccagaacccactcgatcacacctggaatcttacttcttcttttccagatccacaccagaagaaacggccccacggtgcctgccgtcagtgtcacacgattgctgatatgaagaaactgcagcagatataccagatagatgatataaaaatttcccgcaaaaaaatatccggtcagctgttccgcagcagaaaaacggcggaaccgcttccggagtaccagccatgggaggaacaaagttacaatgccatatgccgcgacaatttccagaaactgtaaaattgtaagccatttcattgtcataatctctgttcctcctttctgcttttctttttcttcctgcttaactgaaaatccggatcagctccagcgtctcattatcaataataatatcagactctttcagttcctgcaaaacttcgaagaatttctctttttcccccattgtgaaatacagttttaaccggcaggtatacgctgccagcgcatttccgtgctgccgtgccagacgcatacaccacttttcggtttccggaattttttttaaatccagaagtttcaggcacagtccctcgtaccggtctgccgtaattcgtgcaccgtttttctggtacagcgattcggccgcttcttccagcatattgacatacttggtctgctccattgttgtaaaaattttctgacttaaaattcgattcatataatcgatcagcatttcttcacattctgtttccgtctctgtttcctgctgcatctgcgtgtacattttctgcacattggaccggaaatcgttcagctcatcccgcaataccgaggccgcataatgggatgtctcagaatcttcgctgttcagtgccatggtaatggattccagggatttttgcatatctccgcggatcacattcagcatcagcatacgcatattccgcttgtcactgacggcaagcgattcttccagcggcgccatgttgcgctcccgctcctcgtccgctttcagatgtgtctgcacacgttccttgctgaaaataacatcttccagatcgaccgcctggcggaataccgtcttgtaaatcagataactgcacagaaaaaatgccggaccgacgaccgggcagagaaccatgacgataaaacgaataaaaaatgctctccgattgtcgtactgaatctcctccccctgctctcttttcagatcacacgccggaacataaaggaaaattccaaccagcagatacacaagcgcaatcagagcattcacgatccacaggatcacaaacgccagtgttccgtttatgctcatgcggccacctccccatttgcaattgtactctcatatccagcttctgcaaaacgagtaataacacccagcgcattcttttcctctgtatccgaaagcaatacatacaggccgccatccagcattccgacgtaatcggtctgtcgcagtttctttccgagcacctctgctgcttccagatatttttcttctccgcaggtaatctttaccagggaacattctgtcagtccattccgctttgcctcaaaaaacgcacttaccagctgtgtaaatgcctctttttccaaaatgctgctgttgcccagataacggtgctcccggagtgcttccagataacggtttgcacggacaaccgcattctgaatcagatagctgatgaccgtcagacgattggactcggccaggttcatgcggtcccacggaagtccccacagcatcagaatgatctgcatttcatcctccgcataaatggcctgcgccatcagcggatagcgctcatccatcgtcttgttgatgaatacgcggcgttctttcagatccgtatacatcgcttccatctccgggtagcggatggaaattcccagctttctggccgtcggcgaagtaaaggaaaagagacgcgcatacgactggttggcaacggtgtaaaccgccacatcctccgtattcatcagcttggaaatcgtctgtgctgcatagaaaagcacctcataggcaccgtattgatccagtgacgatgtaatttcataaatttttccaagactgtccttctggttgacaagctgcagttcaaaaatctgtttcatccgcacattgctgtcgttgatctcagtcatatcgccaagctgtccgtgcagatagccgatctcctcctgatcgtcctttttgatatgatgaatctggtcacgcatgtaaccgactaccatgcccaggataaaaagctgcgccatccagatatacgtactgtaatccatcagcacttccagaccgctctggttatacatctggcggaaacagtagccagccgtcgccagaagcgctgagaagatcgcctgctgctgtccatacacaatcgcaaacaaaagcacatacaaaagatacgcatccagctttgcaaaatactggctgccgaccgcacggttatgaatcataaagaacgggataaaacagatcaggttttccagatacggagccagcatgcggaaaatccgcaccagcagtctccagacccggttgccccatccggcgcccgtatcttctctctgtaaaaaggaactgctgtatttcttcatatactctacaacagcttttacgccttcttcgtatgggacaaaaatttttccgtcaaattctttcctgtaccgtctgccatccagcaccaggcgatagccctctccgacggtatcatcccgaatcgtcgttccgtctcccgcattctgctgaatcagctctgccagtttcatctgactgatgacctcgccggaagaaatgtgatacagcggatatttcggatgctctgccatcatcacgcggtacgcaaactccaccgcatcgctctgataaatcatggaaaaaacatttcggctgtttgctgcaatctgattggttttcagcatttccagcatcatctggaaacatgggttattgtcggcctttcctttccgtggaatatcatacatatgatcgaagcgcagaacccgcgtgtccatctctctggtgtcacgatagcttttgcagatattttctccctgcaaaatcgccattgcctgaaagcttttggacgatgccggttccgtttcgtggatatcgctgctgtaagaccggccataaacaacttcggaagacaggtacacaaaacgaccattttgtttaaatgcatacgccgaaagaaggttcgtcagatctgcggtgtaacggaccgactctcttctggcatcactccagtcatagttggtatcgtaagctccgagaaaaataacaagatccgggtttacattggtaaaaatttcccgcacgctctcgctgtcgtaggggaaattataccgttcgaagacgcggcggtactttcctcttccatcccgctttccggtcagcagatatgtcttatgtccgtctttttccattttggtgatcagagcatccatcagtctgctctcgccgccgactaaaaatactatcatacgctacctcgccgttttcgtagatttttcaaacacgctccaggataccatagtttcggaatgtttccagcactgcgtttacgtcctcctgcacttcctccgccggcatatcgtaagcttttccgagccgttttgcaatctcttttgcagatacggcatcgccggtctgctcgtaaataaaagctgctgtttcactcagtgtgagtacctgattcatcttttccgccgtcgccccatatggaatcagaacatattcgtctgcaatctgtctgagtacaaaatcaccttttctggtcatttttatctccattcttctgcgtcttgcttttctttcttacctcagagaaaaacaaggatactaatagttctattatagccctacccaattgcattgtaaactttattttgctttttattgatatctgtaataaagttttatttctctgcactttctttttccattttgtgatatactaaaacatatttgaaaaatcttttccccaaaggagtatcttatgcagccgcttgatgccgtttatttacagattttaaaaaatttatgcacggatttgtccgaaccggtcccgcttgatggtgtggatccgtccgccttataccgtctggccgaaaaacactgttcgcttccgtttcttctgccatattttgaacagcagccgcagttttctgctctcaaacagcagacgaagcagatgctgctctcctattatcagctggaacattttacacgccttactttttcgctcctccttgcggagaagattccctgctttctcttaaagggcatcagtctcgccgccaattatcccattcccgaatatcggaagctgggagatctggatctttatattcccgaaaaagatgctttttcccgtgcctgccggattcttaacgctcatggctacacggaggagccggaggagagcgatcaccatgtcacctaccgcttcacttttcccgagactggccgctcctttacgctggaactccattaccgcatcgtcggtatttatcagttttcccgggccaatgaactggtggacgaaattttttccgccagtcatctgaaaccatctttcgtggaactctacggtcagacctatccggtactgccgccaacggaaaatgtgttttacatgctgcatcacatgctcaagcattacctctacagcggttttggcagccgtctgctctgcgatttcactctgtatctggaacgttatgcctccgaggttaattttgaaaaaatccacttctggtgccgggaatcgaaaatttttcatctttatgagctgattctggaatcctgccgtatttatttcggtctttctgcctccattgatccgcaggttcactgctctgcctctgactgtgccatttttctggaaaaaattctcgcagacggcgatttcggcagtgatacacagagaaaaattgtcagcagcggttcctaccagcacaccggtatccatgcctggttccacgaaggccatattcagatgaagctgcggttcccaaagcttcataaatgcgtacttctctggccggttctctgggtcatcacatttttctgtttcctgtccaacacctaccgtatccgccacacgacactgcggcagacgctggcagacttccgggccgataaccggaagaccaagctgttaaaaatcttcgacaacaacgatttgcaataaaacgaaaaacgagtaagcgaacgtctcccctgttcacttactcgtttttctgttctgtcaatctatgggaatgcgtcttccctctgcctatccccttgcaaaggttccacgcctgtttttaataaaaatgctgatatccgatctgaattccgctgccgtagccgctgttgaaatacaggcatccgccaaccgggctctcacctgcaagtgcagcctgtgcagctgcgtaacagtcacttctcgctccgcgtgcgagcacactctggaaagttccggtcgcaaccggtgtaaactgtccactctgataaataacgccggaaacactgttcgggaaggaaccgctgttgacacggtttactacaaccgctccgactgccaccattcctgtgtagctctcgccgcctgcctcgcactcgatcagtgctgcaagcattgccacatcattgctgtctgcggaaattaccgatgcactgcctgctgtggaggctgctgctgcgctgcttgccgcacaggcctgtgatgcctggtattcctccatggaaacagcaccttttaactcctctgaaagtgtcacatagtctccatgaacgtatgcgctgcttccgctgtactggatctgataccagtcagcctcttcgccgaatatgctgacttcaccattctgtgtcagtgttccaacctgcgcggaatctgtggatgctgcctcacggacacgaaggctgtccgcctgaacaactccggtgataccgcacatattgcggtaatgtgcttttgcctcttccccaaataccagatattcattctttatgtagccttctacaccattggaagagatcttgctccactcgtctcctttttctgttacagtaaccgcatagcccggcatcagaactccgacgatctcggaatctgcgtttgcctcgctgcggatgttgacatatccttctacgtttgctgcagccattgtgctccagtctgttttatttaaaatggtttcttcctttgtctctgcttttacgggtgcagccatgatgacagtcagtgtgagcacgctccccaggatgcccggcacataactttttttgaatgtcatacttacctcctgaacaattattacgtttttgttacaacttgttacaaaccgattctaccagtgttacatctttttgtcaactagaatatttcgacaacattcctgtcttttcccatcgtttttttcatagaacccacaatttttcaccacttttccgcttttttgacgaattggatcggtttttattcccactttttcttctgcatgcggcctgcctggaatacttttccgtgtcttgtttccttctttttattttgcttttgtttcacattctgccctttctgccctctttttccgcaaatattttttaagaaattgtgacagttctttttctatttttcgacatgcattacaaaccttttccacttttgacgcattttcaaattttcttttaactttttatttttacatgatatttctttctacatatggtataatctttaaaaagaaagaaaatttatattttatcaattatttttctttcaatttatacgtgaaacttaccgcaggaaaataaaacagaccgacattagaaaccgatcaggtgaaaggaggatgtcatatgttacacagcacacagacaacgaaaaaacacacaggaaatttgattctgagattcggaatggcaggcctcctggcggccggattatttttttccgctccgtattcggcagcagccgagacagttccaagtgcagaaaatacagacgccggtgaaattaccattcacttcacccattacgatgcacaggacctggaattctatctgaacaccgatcaggcggcccttgcttttaccgatgctgccctgacatttcaggattccacaatggatgcgccggtcaccatgtcatatctttccgatgatggttcctatgtcctgtatcagaacagcgaaccggtcgaggaagtaaacggaacgttctccgtatcgatggttacggaacctggctacacactggatatggatcagatttccttctatgttaatggacaggccgtttccaatggcggttccgttgtgattacggattcttcggcggcgatgacttctcttgtttactgtaccgcaatcccggaaacaccggcaactgacccggagccatctcttccggaagagccatctgcaccggaagttccggaagaaccggccgctccagaaccatccgttccggaacagccatccgcaccggcagaaaccccgaccgtggtacagccatctgcttcggaacagccggcacaggaaaatattcttccggaaaccgcagctcctgcatccaaaaccgcaccggaacaggttcctgcatccgaaccgatcgcagcagaaccgattgccagcgcagttgttacagaagacgaagaagttgatctttccaccatccacccggaagttaccgcatccgctgttacttcttccagccagcttccagccgcaacgcagattgtaccatctgtcagaacaacagacccggatgcacagattattacttcggaaactgcagctcttgaaaatgccgcacagaccgagaatacacagactgcacacacaggaatcggctcctggttccatcagcgaacaaatcagatcctcgcagtcatgatcgctgtgatcctgcttctgatcctgatcgaatcacttctggcactaaaggattccatgaatcagaaaagatcgcatcgcttctattaaaaataaggtccataataaaaaataagcatacaaaaagaaggaacgtatctcatgaaacatgggatacgttccttctcttatattattttttatcctctttttttcgcaaccgctttctgaatctcacagaaatcgtgcagcgcctgacggccgatttttacaattttacggatgttgatggaatttgttcctccctgacgcggcttgaagctgatcgggatgaaacggattttccggtgaaaatacgctccgaaggcagtcagcagtgcgttcggcagattgtagttttccggcatcagcggcagatactcggccacgtagtctgttttcatcagacggaacggggcatttgcatccggcacggatacgtggaaataggtccagagcaccgcgcacagcactttttccacgacagcgcgggaaaagccgtcgccgcggcttgtgcggtttccgaaaatggcgtcgtagccctcgcggatctgccagaacttttcgaactcctccggatcggtctgaccgtcggaatcggtctggaagatatagtccgcaccgttttcaagtgcatagcggtagccgtacagaacggtggaaccgtggccgccgtttggcttcgtcagcacggtgagcaacgggtgggtttcgcactctgctgaagcaatttcatacgtatcgtcgcggcttccgtcgttgatgatcacaagacgggacgcaccgccgccgttatgcttctccacgacgggacaccattcctcgatcgttcttttgatattttccgactcattataggctggtattacaatatataaggtatccattggtattctccttgcatttccttccatccattatacaggatttcttttcattgcgaaagatgcactcatggagaaaatttcccagtaccgttcgtttgttattcttcccacagtttctgcggataacggccctcgtcttttaatttctgcagtgctgccatgacattttctttgtcttctttgtacgttacgccgtaccagttatcataggagcggagtacggtgacttccgcttttttctcctgcagcagttcatcgacaacgaacggcaggaagtattcgccttttaacgggttggttttgtatacattctcgaggaacggcaggaagcggcgtttcagctcgatcagaatgctcggtgtgaagccccagaggttcatggaaacgatggttccctgcggcaatccggtccaggttgcgccgtcatcctcggtgtattcggcctgtccgccgtggttttcgattcttgtgcgctcatgaatgccgacaaggtggttctggtcgtctgcggtgcagatgccgcgggctacgtggccattgtcggtcagggttttgtacaggtcgtaggcaaccatcgcgtactgataggtcgcgccgtcctgctcggttgtcagctgacggtagatctcctcgaatgccgttcttccataataatcatcggaattgatgactgcgaacggtgcgccgtcgatggcttctgccgcacagagaatcgcatgaccggttccccacggtttgacgcggccttccggcacttcgtagcctttcgggagaacgtcgagttcctggtaaacatactctacatccatgtatttctcaattcgcttgtcgatgccctcgcggaatgcctcgtcgatggcttttttgatgataaagatgactttctcaaagcctgcctgttttgcatcataaatggaaaagtcgataatcatatttccgtacgggtcaaccggatcaatctgttttaatccgccgtaacggcttcccattcctgctgccatgatgactaatactggttttttgctcatgatgttctctcctttttattctccaaaataaacttttaatctctccgcaaagtctgccgggatttctctttcaaatggaaatggttctgcatccgccaaatactcggcgatttcgcccaggacaccggcgctccggttcagtgaccaggcggagatccagtcgatcgtatcgtggcaggtatgcatgccgaaaccatcgcggttcagcgtcatcgccgggatgcccttccatgcgaaggtgttggaatcgctgctccagatattgttgatgagcgatacgcctttgtccgcctgttttaagtgctccatgatcacgtcgcatgcctctttcgttgctgccacgccaagcacggttccgccgatggcctgtccggcgaggtcgacgttcatgttgaagcggtgctgcgccagctcggcttcatgcgctttcacatatgcccggcttccgcagagacccagctcctccgcgccgaaccagatgcattccagtgtccgtttcgggcggttttcggcgaagtagtgtgccagctccatgatgatcgctgcgcccgccatgttgtcgtatgcaccaggtccctgcggaacggaatcgtaatgagccgtcagcgtcaggattttctctggctgctcggttcccgggatgcgcaggatgatatttttcgacgttctcctgatttttttctgctgtaaaacgaggcgtgcacggctcgctccccgttctaccagttccatcgcatcaagataatgaatgacggcgcacggcagtttcggattttttacgccgcgcagggtgcggtagtccggcagacggtcctcgtctttgtccagcggcgttccggtcaggatcagaaatccgacggctcctgctttttccagtttttcatagttttctgcattggcaccgccgttgatcaggacgattttcccttctgcatgggaaaggctgaccgggtcgccgttttctacgtagaggaatggtgcctccacgccttccggagcggtattggctgccgcgaagcagccgcggacggtgtatgttttctcatatggctctgtgaccgtaaagacagcttcgtcaacctgccatgtctcaatctcgaacggctcgcggcggatctgcaattcgccctgcccccatttttctgcgatttcagaaagttctttttcgatccggcaggctgctttttcttcgccttccgttccggcttcgcggatgtagttaaactggctgacgaacgcatactgccgctggccgctgatggtatttgctttcataataatgttatgtccttttcttttctttttttattttcttaaagttcttccagtaccgctctcgcgctgcgcacggctttgacgtccgtgcggtagagggtgtattcgcttaaggatggaagtcccatgttcacattttctttccgatactgcatcgggctcgccagttcgatttttccggacatgtggtaggcggtcacgccggttttcggatacagctcgcggatcgcatccgcgcagataccgccgcccgcctgaatacggatgcgtcccgccgcctggcgctgcagttcggcgagaagctctgctccttttaccgcactgttctgctgaccggaggtgagaatggtgttcataccgagcgataccgcctgctcaagcgcttctttcggatcgcggcagacatcgaacgcgcggtgcagcgtcacagacatgccgtttgccgcctccatcagctgttccatcgctgtcatattcattgttccatcctctttcagcacgccgatcacaacgccctctgcaccgagttcgcgatacatcgcaacttcctcgcaaatttcttctaattcatatggggtgtagcagaaatccccgaaccgcgggcggatcagtgcatgaatcggaatggttgtctgtctgcggatcacctcaaacagcttcgaacccggcgttgttccgccgatcaccagattctgacacagctccagccggcttgccccgccttttgccgccgcaagcgccgactccgccgagtccacacagacttccaggatataatcgttcataaaattccctctgttttcgtaagttttctttctctatcataccctatttagggcgattaggaaagagcttctttggttcactttcgttcacttctgcttctgatgcagatatttttctctcgttgccatgccgccgcgaatgtggcgttcagacttgttcacatccagaattttcctcgcctctgccgccagacccggattcacctgtaccagacgtgatgtcagatccttatgcacggtacttttgctcactccgaattttttcgccgtctgccgtacggtcgctttcgtctcaatcatgtaaattgctgtctccacagcacgctcttcgatatagtccctcacaaaaagcctccgaagacgctgtttttacagtgtattcggaggctttgatgggtatgtcttctattttattatttgtaatatacccataccgcttttgtctgttccagcacctgatcgatatcccaggttttttcggaattttttctgctgtttgggtcgttgattttcagtctgccattctgcaatccggtaagaacgataaaatgaccgttgctggtaaactccccgggtcccatcagggcaatgatgaggtttccggcctgcaggttgttttccacccgttcccgttccacagggatttctttgctggaaaggccgatctgccgggctccttccagcatcagagaccaggcggttccgctgccgtctacggcatagccgttctgtgaggcaaaatcggcgacccagcgcggattttttgtgatatcgccggtcatgaaaatggcaaccatggaaagtgctgtcggtccgcagccgcttaatcccatcacttcaccggcatatcggtgatagccccatctctgatcccactgcaagagaagcggaacctccgatgcggatgacaggtcgctcaggtcaatctccggctcctcctcttttttcaacggatattcttcgacgaacgtctccgtctcattgtttctctcgtaaagcgacaacagctcctccgggtactgatccattgaaatgccgtttgcttttgcataccgttggatcggattctgccggaagcgccgcacaccgcccaaaagcagaagacagccgaacagcaatagcagcccgcggatccgccatacctttctttttcgtctccgtgctctttctcttctttgtattatccttctttgtgtcattcttttttgttctgctgtctcttgccattccagtgtattgttttcacggatcatgaaaaatccccctcccgatcttatggtgtactccaaaaatctttctgtgcctgattttgtgagatgattgagagtacattcttccttttcatcataacaaatttctgatttttctttttgtatattttccgaagaaacactgctttttttccgtctgctttcttaagattttttgtatctgtgcaaagccatgcgaaacggaagcaaaaccgcaagcaggaaaaagatggcaaattccggaaatatcattgagaaaaaagttcaaaaatggtaaaataggaaaaacaacatctttaagcggaggataaaacaaaatgaaaaaactgaaagtaaaaaaaggcagcacctgtatggcttgtcttgcctgtgtgggagcatgttctgaggcattttataaggtatttgatccggacaaggcatgtctgcagatcgtagagaaaaaggctgttcgcccgatcgcctgtccgcagtgcggtaaatgtgccgaggcctgtccggaaggcgccatcacccagaacccgaagggcgtttacatgatcaacaagaaaaaatgtacgggatgcggagcctgtgcgaaggcctgtccatttggcctgatcgtaaaaaccgagggcaatccggcttccaaatgtattgcctgcggtatctgcgcgaaagcctgtccgatggatgtactggaagttgtggacgaataatgatccgaactcttagatatcgccaggatctcgtgtaagcacagatcctgactcattgctcacataaacataaaaatgcactgtggaacgtcgtcggacaattccacagtgcatttttctgttaaacgaaaaacaattgattccctctcgccgcctggcagaatgatcgatgcccgtttccgcagacagcattccgacaaaaagggacaaaatttacaattttactcccgcgccagcagaaccatcgattttgccggaagcatcatgctttctttcatctctgctccatcctctgcgcagcgttttccatcgcagagcagtttccagtttccttccggaagtttctgcaaagcttctttttcccatggattgtagaagacgcagactgcgtggccatccgggtattccagttcgtaacctgcgatctggttttcacggaaaaatgtctttttacagtccggctcgcacgttccgtatgcctgaaattttcggcgcagagcgagaagaccacggtaatagtccaccagctcttcctgctctaaggcgcgtgtccagtcaattttgttgagctgccacgacgatttgaagctgtttccttcgccatgcttcgtgcgcgcaaattcctcacccgcctggaaaaacggcattcccttgcaggtcatcacaatgcccgccgccagacggttcatcgaaagcgtccgctcatccatcttgtcaaaatccggctccgcatcctccttccgcttcggatcggacagttttaatttatcccacagtgtataattatcatgtgccgacacatacggaatcagctggctcgcattgcgcggctcataggctccttttccgtccagccagccgtctgtcgcggaaagtattcctgctgaaagacgctcttttccattgacatagcctccctctgcggcaatgaaaacacttcccttgatggaatctctcgtatcgtcacagaacatggaaatgccatccatcagctttccgatattctgtttatccgaagggaaatatccctcctgcattgcgcttgccgctgctttccacggttcaccgtaaaccagaatctcctcgccgcgcggcatccggttcagagctgtgcggatcgcattcatggtctccgtgtcatgcagtgccatcagatcgaagcggaaaccgtcgatatgatattccttcgcccagtaacaaaccgagtgaaccataaagcggcggaacatctccctttcacttgccgtctcgtttccacagtcggagccattggaaatcgtgccatcctcccattcacggtaataataataaggaactgttttctgaagcggcgaatcgagattgtacgtatgattgtataccacatccataatcacaccgatgccggccttatgcagcgcctgaaccatttccttcatttcccggatacgtacctccccgtggaacggatcggttgcataggatccctccggcacattgtactgcaccgggtcatatccccagttgaacgcttccgcatcatcttccggcacactgccaaaatcgaaaacaggaagcagatgcacatgagaaatgccaagcgatttcaggtaatcgaaccccgtcgcatgaatcccgtcgccgttcagcgtcgtgccttcttccgtaaacgccagaaactttccacggtgtttatccgaaataccggaatgcggatcactcgaaaaatctttcacatgaagctcatacacacaacgatcctccggccggatttccggtctttcatcctgctcccagcctgccgggtccgtctctgcaagattcaccaccatgctccgctccgaatcaataccggaagccacgccgtacggatctgtcgtatcaaagacaccatccgagtgcaggatatgatacgtataatacgttccataccaggctccctgcattgcacagctccagacacccttttcgccgcgcgtcatcgcaatcgaggctatttttcggtccccgcgctcacggctgctgccgcaggaaaacagctccagtgaaacctccattactgtcggtgcccagagcttccactctgtcacaaactgctcatcctttttcggcatctgccagttttcatcacattccctgctctttctcaccgagacaccgaggtcatctccttcgtacgtaaagttttccacaaattcttccgattcaaaaaagcttttccactccgccggcgttcttttcaccaccgcattcatcttctttccctctatttctttgtaaactcgcagaatctctccgacactccacgcctgcgcatagcagcccttcgacatcaccggcgccgcaccatcataaatctccgccagatgaaacaggcatccttcctgcatccagctcgcaagacgctccagtccgcgatgcacttcctgttttccctccttcggaaaatagttcagcaccgcacggaaatacgccccaagcggaaatccccagactgtcccctgatgatatgccctgtcacgctccggctggcttccgccgatccatggatgaaatgccggatcctccatctccaatgaccgcattcctgctgtcgtatacagcttttctttgaccgcctgtaagatccgctgcccctgcttctgactcaccatctgaaacggaagtgccagcacaaagacctgattgcatcggaactgcttctcttcatacgtgccgttcagcacatccttcagatatccttcctcttccatccagaacttttcgaggaaactcttcttcacctgctccgcaagcttcccatacgccgatccatcctttccgacaaacggtgccagctcttccagaatcctcagaccattataccagtacgcattaatctccaccggcttcccgtgacgcggtgtcggcagctccttgtcaatccgcacatccatccacgtcacctgttccagaccgcccccggccataatcagcccgtcactgtccattttaatatggaaatccgttcccttctgataccagaacacaatatcctccatcaccggaaacgcctcgcacacaaactccagatctcctgtttcaaggtaatactcatacaccacatccaaaaacaaaagggccgcatccaccgtattatacatcggaagcgcatccccctccggaaacaggttcggcatcagtccttcttttgtatatgccataaaagtccgaagaatgctcttacactcctcatactccccaattgccagcgtgcaccccggcagcgaaatcatcgtatcccgcccccagtccgcaaaataaggaaaaccagccataatactcttcccacctgtcgatgcacgttccgtaatatactgactcgcactcaccgccagccgctttcccaccggatcagaaatcccggacttttccgcaatcatctcctgccgcttctcttcctcttctatccacagcgcaatcctttcctcatcccacttatccacatcatccgcgagactatacacaacaaaaaagacctgctccctgccgtctcccgtcatctcaaaccgaatccgatgattcacgacagcacttccgatgccatctcttccatcccgcgcatcctgctcaaaaaacaaatccctccagatcctctccttctccatctgaagctccccattcgttccataagaaagaatcacaccattactcgcaatgcacttccggtccaccgcaaaattctgcccctcctgcagctgctctcccttcgccgcaaaccgcatcaccggccgaaccgaaaaactccccttcttcccacttctcacccgataccggacaagaaccgtattctccccctgaaccatcccaatcgtcttctcaatttcaatccccttcacccggtaaaaccataccggcagactccccatctcaaatccttccagaaaccgaaacccctccacattctgcgtccgattcacaaactcctgtgaaaacagctccgtttcctctccatccacctccaacgtctcccagacattcgaaatcagatgctcccgcaccgtaggcgccttcaatgctcccattaacagcgcctgatcattcctcgccgcattccccatcaccgtcagcgaacaataacctcccagtccgtttgtcagcaaaaaacacttcttttctccactccggaaatccatccactccgaagcattcagtcgaatcctatccatacccaaaaacctccaaatttcacacaatatcttcccgaaacttttctgttttcataaaatcaagcacaaaaaactccgaaaatattttttttcattctatctccaaacttcgcaccagtcaacaaactcacgccgattcgccctctgggcgaatccagcccctctccccgtcctccaacacactctccccttccacacacaacaatctcacgccgatctgccctccgggcagatccagaccactcctcccgtccccaacacactcccacctctccacacaacaatctcacgccgatctgccctccgggcagatccagcccctcctcccgtccttcaaccccaggatctggctccggcgtcgtggcacctgccgcgcagacggagtcagatccgtcccccacacacaaatagagcagccgacccctcatcggctgctccacaaatcatcctttgacggctcctgaaagcccatctgtataatatctctgcattacaacaaacaaaatcgcaatcggcaccgaaatgcaaaccgctcccgccgcaaagcaagtataccagctgtcgatatactccttctccagcatcttccacagacccagtgcaaccgtataatacttcgcattcgccctgcagataacctttgcgaaaataaagtccagccacggtcccagaaatgcactcaaagtcgtgtacacaataatcggcttactcagtggaattgtcaccttcgtaaatacctggaatctcgttgctccatccagataagccgcctcatcc

SEQ ID NO: 1111 - DNA, 5990 bp, unidentified
  source 1..5990: mol_type = unassigned DNA
atgagcagttataagtatgatccgaagtcattaaaggcagaagaatttatcaatcatgaggagattctggaatctcttgattatgcgaaaaagaacaaagataatctttctttgatccgcgagattcttgagaaagcgaagaaggcaaagggaatttcccacaaagaggcagccgttttgatggagtgcgatgatccggagatcaaccgtgagatcagagagctagccatggagatcaaggagaagttttacgggcatcgtatcgttatgtttgcaccgctgtatctctccaattactgtgtgaatggatgcacttattgtccatatcatcacaagaataaacatattcctcgaatcaagctgacacaggatcagatccgtgatgaggtcattgccctgcaggatatgggtcataagcgcctggcgatcgaggcaggcgaggatccggtcaacaatccgcttgagtatattctggaaagtatcgacacgatctacagcatcaagcataagaatggtgcgatccgccgtgtcaatgtcaatattgcagcaacaactgtggagaattatacccgcctgaagaatgccggaatcggtacttatattctgttccaggagacctacaataaagaatcctatgagcagctacatccaaccggaccaaagcatgattatgcatatcataccgaggcaatggatcgtgcgatggagggcggcatcgatgatgttggtcttggcgttttgtttgggctggagggctaccgctatgagcttgttggtatcctgatgcatgcagagcatctggaggcagcacagggcgttggaccacacacgatcagtgtaccgaggatctgcccggcagacgatattgataccggtgatttcagcaacgccgtaccggatgagatcttcgagaagatcgttgccgtgatccgtatcgcggttccgtataccggaatgattatttctaccagagagtcccagaagacaagagaacatgtgctgcagcttggtatttcccagattagcggcggctcccgtaccagcgtgggtggttacaccgagccggtgcgtgatgacagctctgcacagtttgatgtcagcgatacccgtacacttgatgaggttgtcaactggctgatgaagatgggcttcattccaagtttctgtaccgcatgctaccgcgcaggaagaacaggagaccgttttatgtcacttcttaagtccggtcagattgtaaactgctgccagccgaacgccctcatgacattgaaggaatatctggaggattatgcatcaccggagacgaaggagatcggtgaatcgctgatcgccaaggagatccggaaggtgccaaatgagaaggtcagagaaagagccatccagtatcttgaggagttaaaggaaggaaagagagatttccgtttctagaacatagaaatcaatgtcctgaaaatgggacagacaaaatgttatttgaaaaaataatattaagaaacaataatatagaatgcaataaaaagactgctgctttacgaatagaaatcgtgaagcggcagtctttgttttccatgaaatcctcgtttctctgaaaagacaacgagaatttcattgttgaaaataaattatatcattagttaaaaattaaaactctatctctttcagataacgtgctacggcatcctgccaggttggcagtggagtaaagccgtttgcggtgagctttgatctgtccagacggctgttgaatggtctggctgctttggaaacaccgtactcagcagttgtgacaggagtgacggtgacgtgtgactcgtcatattccgtgtgtcccatggctgctgcctggcggaagatctcctttgtgaaatcataccagctgatatagccgccttcattggttgcatggtaatatccatacttgtccgtctcgatcatgtcaacaagaagtcttgcaagatcgaaggtataagtcggcgtaccgatctggtcatttacaacagtcagcttatcatgtgtctttccgacattgagcatggtacggataaagttctttccgttggtaccgaatacccatgcaatacgcacgataaaatacttgtccaatatttcggacacagcaagctcgccgtcgagcttggatgcaccgtatacatttaacggcttgtaatccttgcagtccggatcccacggtgtggttccctgaccgtcaaatacatagtcggtactgatatacatcatcttgcagtcaagatccttgcagacagcggcgatgttctccgtgccggttgcgttgacgttatagaccttatctttgttggcatcgtcctcagcggcatccacggcagtccatgcggcacagtggatgacagcatccgggttgatctttaaaagcgtttcagcgacagaggcacggtttgtgatatccatggatacataggctgcttttgttacataggtttcgtctgcaatgccgttgtattccggagcaaggtcacttccgatgccctcatgtcctctggacgcaagctcattcatgacatcatgtcctaattgtccggcgacgccggttactaatattttcataaaacactgttcctctttccgggtatcattctatggttatggattagcggttaccgtacatcttctcgtagtaattctggtactcaccggagatgattgtctcccaccactccttgttgtcgagataccactgaatggtcttcttgataccgtcagcaaacttcgtctcaggaagccagccaagctcgttgtggatcttggtcggatcgatcgcataacgcatatcgtgacccttacggtcggatacatatgtgatcaggctttccggcttgccaagctccttgcagatgatcttaacgatatcgatgttggtcatctcgttgtgaccaccgatgttgtaaacctcgccgacacgtcccttgtggatgatcagatcgatcgccttgcagtgatcctcgacgtacagccagtcacgaacgttttcaccggtaccgtatacaggaagcggcttgtcattcagtgcgttggcgatcataagaggaatcagcttctcaggaaagtgatatggtccgtagttgtttgagcagcggctgatcgttacaggcagaccgtaggttctgtgatatgccagtaccagaagatcagcgccggccttggatgaactgtaagggctgcttgtatggatcggagtttcctctgtgaagaacaggtccggtctgtcgagtggaagatcaccgtaaacctcatcggtagatacctgatgataacgggtaatgccatatttacggcatgcatccatcaatacggcagtacccattatatttgtctgaaggaatacctccggtgtctcaatggaacggtcaacgtggctttctgcagcgaagttgacaacgatgtccggatgctcctcctcgaataatttgtaaacagcctcgcggtctgtgatatcttccttaacaaaacggaaattcggattgtccataacaggagccagagtagagaggtttccggcataagtcaggcagtccagacagacgatacggtagtccgggtacttgttcagcatgtgaaatacaaagttacttccaataaatccggcaccgccggttacgataatagtcataatttttctccttaatctgtaatataaattgttattcggtgtctggcatcgcaaaacattaattagtgaagaacatccatgtacttgccgttcagaacgtccatcagatactgaccgtactggttcttcttgagcggctcatatgccttcagcacatcctcacgggtgatccagccgtttaagtaagcaatctcctccagacatgcgatcttgcggtgctggtgagactcgatggtctttacgaagttggttgcctcgacaaggctctcatgtgttccggtatccagccaggtaaagccctgtccgagaagttctacgttcagctcgccgttttccagatagacgcggttcagatcggtgatctcaagctcgcctcgtggacttggctttaactccttcgcatatttgacaacgcggttgtcatagaaataaagaccggttacacagtaattgctctttggcttctccggtttctcttcgatggaaacagcctttccgtcctgatcgaactcaacgataccgaaacgctccggatcatcgacgtaataaccgaatacggtagctccctttccggtctctgcattctcgacagcggctttcagccgttttttcagtccgtggccggcgaagatgttgtcaccgagtaccatggcaacggtgtcgtttccgatgaattcctcgccaatgataaatgcctgtgccagtccgtccgggcttggctgaacagcgtaggtcagatcgataccgaaatgatgaccgtctccgagcaactctttaaaacgaggtgtgtcctgtggtgttgagatgatcagtatctcgcggatccctgcgttcatcagtacggaaagcggatagtagatcatcggcttgtcgtagattggcagaagctgttttgatgtgaccattgttaatggataaagtcttgtgccggaaccgccggctaagataatacctttcataaggaatctcctttctttgatctgtttgtgtaagtcccaatagaagtatgttcatttttcagtttctgtacacagtataaaaggtaacgtaacgtcatcttcaagctttttttgtaaaattgtcactttgctgtaaatccgataatgaaaatgttggtttattgtgaaaaatgaatacgtttccgggcagtttcgcctgtctatgagggacggcacaggaaaattccggcgtccttcgtgatcgtaaagccgtccttcgctgccttttggacgaaatgacggaagtccttatagcggtttaacagatactggttctgattgccatggcaggataaaatataatcgatcagcggttcgggttccttcagataaatactgtctacataacgggacagagttacctgacggaaatgcggctgcaaaatagaggctccgttttccagaccgaagcggtcataaagattgtctgctgcaagctggatatgcggatcaaaatcctgcaccagtttactgatctccttcatgtgacgggaaccgtaggtgctgcagatgaagcagccgtcctttttaagaacacggcggatctcactgcagacctgcggaatgtcatcgcagtagaaaaggacatggttggcaaagatcagatcgaaggaatgatcctcgcagggaatattcgcacagtcgatcgtccggtaggagaaacgggaatcctcagcaccgatggtacgacggacatcacgcagcataccctcggatatgtcggaaagcagaatggagatctgttccggaagctgtgcaagattctctgtccagagtgcgccattgccgcaaccgacctcaaggatatgcatgcccggacggatgtctgcctgctcatagatccagggaaaccagccctgcttattgacagaatacttctgatgaagattgatccgtgcagtgatgttggtggaatcctgatactgccgtttcaggcttgtctccataccggtcaggtggatcaggcgcagcatctggctccagtccagctcgtgatccttttctatggcatcggcggtatcacggatcgccgtctccacaagctgcatctgttcgatgcgatcctggatcagcttgtgctgctgctcgagagaatttttcatcatatgatagtcggcagtatcgaccgtcatctcgcggatatcgtccagcgagaaaccaagatattttaaaagaaggatctgctgcagtcttgccagatcatggtcggtatagaaacgggcaccattctcattcacataggaaggcttcaggatattctgcttatcgtagtaccggatcgtgcgtacagagacgccggcaagccgggcaaactgtccggaagagtagtagccgtctttcttcat

SEQ ID NO: 1112 - DNA, 6369 bp, unidentified
  source 1..6369: mol_type = unassigned DNA
ttatatacccttgtcaaccgaaaacgccttgttttcaccttttgtacacaaagcgtcagccctgtattccgtaggtgacacaccctttgccttgtggaatattcttgaaaaataaaggctgtcattataccctaccgaccttgccacagccgacacagaaagctcagtttcttccagcaaacggcaggcggcgttcacacggaaatcagttatatactgtgcaggagaaagcccctcgtattccatgaaagctcgatatagcgtggcacggctcacgccaacgaaatcggtggcattctcgacccctattccaagggtgtagttgtgtgcaatgtagtttttcgcctttgtgacatatccctttgcggtgctcccagaacggttttgacttcccgagcgttccataagaatgcccagtgtgatgtaaagctgacctgtcattttcacaaggtctgagcttctgtttccgctaagacgataaatgcgttcaagactgtctttaagctcgcttccaaagtctgcggagataacgggacactctcttgtgaagcctgcacgatcaaggataaattcagcgtcagagccgttgaaacctgcccagtagtattcccatgggtcgttcttgtcggcagtgtaggttataacagtgtaggggtaaatgagaaaagtgtcccctgcgctaaggtgatactctccctgcggtgttttgtatacgcccttgccacttatgatgtggtggataagataatggtcacgaacaccgcttccccaactgtgaagcccctgacatttttcatagcccacgttgtatactgacagcgaaagtgcatccgtctggtctgatttaaaggaatggcggtctgtattcattctgtgtgttcctttctgtgagatggtctgttatagatatgatagcatatttttattctctttgcaacaaaaatccatgtgtttgaaacaaaaatggtattgcaaaaacgtgaaaatatggtataatgtaagtgtaagaaaaaacttgacatatttgggaggtaaagaatatggcaaaaatactcgttacaggcggagcaggatttatcggaagccacacctgcgttgagcttcttgaagcaggctatgaagtagttatagttgataacttttcaaactcaaagccggaggctcttaacagaataaagaagataacaggcaaggactttgctttttatgaggcagatcttcttgaccttgcggcgctcgaaaagatatttgaagaaaacaagatagacgctgttatacattttgcaggtcttaaagcggttggcgaatctgttcagaagcctgttgaatattaccataacaacatcacaggcactctcatgcttatcaaggcaatgagaaaatacggctgtaagaagatagttttctcatcttccgcaacagtttacggccctgtaaacaaagctccttacacggaggatatgcctacatcagcaacaaacccttatggctatacaaaggtaatgatagagcagatactgagagatgtttatgtttccgacaacgattggtcagtttcacttctgagatacttcaaccctatcggcgcacataagagcggccttatcggcgaagaccctaacggtataccaaacaatctgcttccttacatttgtcaggtagcagtaggaaagcttgaaaagctcggtgtgtttggtgacgattacgatacccctgacggaacaggtgtaagagattatatccacgttgttgaccttgctaagggtcacctttgcgcagtcaagtatgtaatggaaaacaagggtgttgaagccgtaaacctcggcacaggaaaaggctcaagcgtttatgatgttcttcacagctttgaaaaagcctgcggaaagaagctcccatatgtagtaaagccaagacgtgcaggcgacctcgcaacctgctatgctgatacagcaaaggcaaagaaggtctttggctgggaagcacaatatggtcttgatgaaatgacagcagatagctggaacttcattaagaataatcctaacggactttaatacataagcatagaacataataattttcctaggcagggacacacaaatgtgtgtccctgttttttatgccctttttccattcatgcaataatgcgacaaaaaaatcccacagtaagtgataatatattttcagcggataaaacgaaaaaatgaaaggaatgataaagcatgaatgtggagataaaaaactatccgtcagccagaactcttgtggcagagatatgcggcgatatcgaccaccatacagcaaaatatttcaggggagagatagataaagccattagaagccataaccctcttacccttatcctcgactattctcaggtgacttttatggatagctcaggcatcggacttgttatgggcagatacaggataatgtcagaaatgggtggcgaggtgatagtggcgtcgcctcctgcttatatccgaaaggtcttgcagcttgcaggtatgcacagactcacaaagatagtcacggatattgccccgtatatacaagagaagaaagcagctcaggaacagaatgaaagccccgatgacaaaacaaaggagagtgataaaattgaaacgaaaaccccttaatgaaatgaaagtcagttttcccagctattctgaaaatgagcgctttgctagagttgcagtcagcggtttccttactcagcttgaccctcagatcgacgagcttgcagatgtcaagaccgcagtgtcagagggagtcacaaacgccattgtccacggataccgaaacaccctaggggagatattcatgcagataaggatattcgagaacagacacgtctacataaaaataagggataagggctgcggtatcgctgatatagagcaggctatgcagccgcttttcaccactgcgcctgaggaggaaagagcaggccttggctttgcggtcatggaaagctttatggataaagtgaaggtgcgcagcaagcttggagaaggaactacccttatccttgaaaaaaccttgaaagaaagagtataaaatgagcagcatagtcgagacccctcttgcagaagaaaatctggggcttgttcacctgtgcgcaaaccgcttccgcaaccgtggcatagagtatgacgacctctacggtgcaggctgtataggtcttgtaaaagctgcgaaagcctttgacagcgaccgtggtgtgaaattctccacctatgcagtgccagtgatattaggggagataaaaaggcttttccgtgacggtggcacgataaaagtgtcacggagcataaaagagctttccatgcgccttgtaagagagcgtgagcgattttccatacagcaggggagagaacctacagtaagcgagctttgtgagctgtcaggagaaagcgaagaagccgttactctagccatgaacgtcgccctgccccctgttagtcttactgaaagctcagatgaagacgaccgccacggacaaatagatatccctgttgatgctcctgacatagaaattgctgacaggctctctctccgtcaggtcatagcttcccttgaagcggaggatagaaagcttatatacctgagatattttcagaataaaactcagatggaaacggcaaaacaacttggtatgtcgcaggtgcaggtgtcaagacgagaaaaaaagctgctcactttaatgcgtgaacagcttaaataatatcattacagtgggcggcttttggtcgcccattttttacaaataagatctgagtatctcgatagtttcttcatgtgagcaaacagcgtcagaatctataaagtgctgaaaataatcccagaaagcctgaacaaggctcgtttcgcttatcttcaaataagaaaaatcagagaagcagttgtttctggcaatgatgttaagacttgtgttgtcagaaatgttgatacaaagatttttcgacaccgcaaaatagtcgttctttattatcctgtagtctgccatgccgttttcacaaagcgatatcattatctggagcattatcttgcgttctgcaagagtgggaaaagtatatgaatttctcggaagctcaaaaatctctcccgtcgtcataaactctgcaagacccttttcactgaacagatttacaaatttgtgttcagaaagagccttcttgcccatggtgagctttgcttttacaaatttctttgcgtcagctggcaaaagtgcatgggcgttgtatatatcctctgtaagacaaagcatggtgcatggctgaaaatctacgccgatgaaatttgcgttgtcatcgtaccaaaagtaaacatattccaaaatatccacggcgtggtcgagaagctttgcacattttgtcttgaacttttcaaactgccgcatataaaattctaccataggcttagatctgtatataacgccctcgcaataatcgctgtctgttctgatcagaaaattattcgttatcattatgtttggcatgatgttcgtggagttgaaatatgccgacgcaccctcataataataaaaagcctcatatttttcatgcttttgtgcaaggtgacatatgaacggaaaaatatccagattgtattttgcggtgtttttttcacctgaggtgttgtcaaagaagaacagatggtttatggtagactcgctgccttctgcggcaatggacagcagattggtaagaaactctgttggctgagcgatgacctgaatgtcagaaccgttatgaacatcgctgcatataagcacctgcaggttttttctaagctcacgtttgtcggtgtagatggatatctcaggcacagagtcaatatcaacttctgtcttgaaagtcagagcgtcaggctcttccatgtttgtgtttgccatatcgtgtattatctttgacacctgcttgcggcgattgtagacatcttcccccatctcagaaatgttataaagctccatgagcctgcttttatcctctgtggaaagcatgagctgcaagcttatattttctacaaaatctacgcttggcactttcctttcccctttgagtatcttatgaagatatgttctgtcgataccacatttttcggcaagagcttttatagtaatatcttttttctttatgtattctctgagaagttccgaaaattgtgacattggcatcatatcctttctgtagaaaacaggcatttaaagtatatttaaagtatatttttacataccgatacctatattatatcctatttacgcacaattgtcaacctttgataattttatcttattaaggcaaaaaacgtatatttttataaacagctgcaaaaaatacaagcgtaaaatggaatactttaaaatttggaggagttttcatgaaaataatattctatgacgcaaagcagtatgatatagattcatttgaaaagcagcgaaaaaactatcccgatatagaaagcgtttaccttgaagccgacttgacggaagacacagcaaggcttgccgagggctgtgaaggcgtgtgtgcctttgtaagctcaacgataacaggctcagtgcttagacggctccatgaacacggtgtaaagcttcttcttatgcgatgtgcaggctataataatgttgatataaaagccgccgataaatacggcataacagtgcttagagtgcctgggtattctccggaagccgtggcagaacacgccatggcgcttgcgcttgcagtaacaagaagaatacacaagggctatataaaggtaagagagaacaatttcagcctgaatggtcttatgggacttgatttccatggcaagaccgctggtataataggcacaggcaggataggtgcggcaatgtgcaggatatgccacggctttggtatgcgtgttatagcttatgacgtttatcagaaccccgaccttgacttcgtgaaatattatccccttagcgaagtcctgcgggaaagcgaccttatctcgctccattgccccctgacagaatcaagctatcatcttatcaatactgaaactatctcccttatgaaagagaatgttgtttttgtaaatacctcccgaggtgcgcttgtgaataccgaagaccttataaaaggtatcagaagcagaaaattccacggagtgggtcttgatgtttatgaggaagaaacggagaacgtctttgaaaaccgacaggaggatatcctagaaagctccgtgaccgcaaggcttctgtcttttcctaacgttatcgtcacctctcatcagggctttttcaccgaagaagccctagccgccataagccgcacaacgcttgagaatgcttgtgcttttgagcgtggcaggataataaaagaaaatcaggtcaaatag

SEQ ID NO: 1113 - DNA, 11742 bp, unidentified
  source 1..11742: mol_type = unassigned DNA
atgatattgactgccgataattgcgaaaaatttatcagcacaatagaaagccttgacggacttgatccttttgcctgccgcataatttcgctttgtacaagttacaatccgcatcttccgtttgtggattattggactgtttttgatgacaaaagcaacactgcaacgggagcaatcgcacgaaacggcacggattttattctttttctgaccgataaaacggatatagacgaagtatcgacttttatgcgtgttgcaggcgcagcctcggtgatttgcagtaataaatacaatctcgatttattcggatacgaaaaatcgcacggccctattcttgtgcgcactgaagagattagcgagaatgacagccttataattgatactcctaagataaaagaggcgtatgaacttattgcaaaggcggcggacaaatattttacaccgccaaagtttgaggacttttatgtggatataaaccataaactgcgccatggcacaatgcggcttctcgggttgtatgacggaaacgaccttgcgtctgttgcaatgactgttgcggaaagcaggcagggcgctgtaatcggtgcggttgcgtgtttaccgaaattccgcaacaaaggatacggcacatacatagtaaatcaccttacaaacattcttgtaaaagagggcaagcgtgtgtttgtgcatagggcagagcaggcaaacaaggcattttacgattatttaaaattcaaatgctttgacagctggagtgaataccattttaaaggatgataaattttgagtttttttgatatagacaacagaataatcgaggcctcgcaaaaggctatggagctttgcaaaagcaaacttgatgaaattaacgatattcaggaatacaatcagcagaagatgataaaagcctttcaggaggcaggggtaagagaaagtcatttttcgggttcaacaggctatggctatgacgatttcggcagagatgctctcgaccgtgtgtatgcctatgcttttgacgccgaggacgcacttgtaagacataactttgcaagcggcacacatactcttacggttgctctttttggtattttaagaccgaacgataccatgctttccgtaacaggtatgccgtatgatacaatccgctcggcaatcggacttgagggcaattatcccgggtcgctaaaagattttggcattaactttgaaatggttgatttaaaggctgacggcactgttgattacgaggcagtcgagcagagaatcagagaagaaaagccgaaaatggtttatattcagcgctcaagaggatacagcataagaccttcgcttacatacagagaaatcaaaaagctttgtgaaatttccaaaaaagcgtcaccaaagtcaattattatgctcgataactgctatggcgagtttgttgaaaaggttactccaatgtctgtcggcgttgatattatggcaggttcgctcattaagaatgcaggcggcggcattgctcctacgggaggatatatcgcaggtaaaaaagaacttgttgagatgtgcgcatacagacttacaactccgggtacgggtaaggaaatcggtgcaacgctcggcaacaaccgtgaactctttatgggtgcgtaccacgctccgtttgtgtcttgcgaggcattaaagacggcagtgtttgcatcggctctttttgaaattctcggttatgatacaacccctaaatacagtgaaaacaggggagatattattcagcttattatgctcggaaacgaagaaaagctttgcagtttctgcgagggaatacagagcggctctgccgtagacagctttgtaaagcccgaaccgtcggatatgccgggttatgaaagtcaggtaattatggcggcgggtgcgtttacactcggctcgtcaatcgaactttccgcagacgcaccgttaagagaaccgtacgcagtatggatgcagggcggacttaatttctgttcgggcaaactcggcgtaatgcttgcggcggataagatattaaagaaaagcgaagaaaattaaaatataatttgacattttatttttaccgaactgctcataatgtatgggcagtttttcttttattaatcatttaaaccataatttaataatcttccaaagcatttaagacagaacctcttttaaataacacataaattccgactttgcataatataccattgtagagaataattattgtgcgggtgttaaaaatgaaaaaatcagagctaaaagcctttggcataattggtggagataaacggcagctttttcttgcaaagtcaatatcagactgttgttacgatgtaattctcggcggttttgataagctgaaaagcctcggtgcgattgaaatatccgacataaaaaccgcaatttcaaaatcagatgcaataattttccctttgccgtcaatttgcgcagacggtacggtaaacacgccgttttcggacaacaaaacaaggcttgacgaagaaatgatttctcttttaaaagaaaagccgatatttgttgctatgaaaaataaatttttaaaagcatatccgcagcttgcagactgcgaggtttacgattattcggcaaaagaggaatttgcggttgccaatgcgttgctcaccgccgagggagcggttgaaattgcgatgaatgagtacgagggtacgatttttgacagcaaatgccttgtttgcggatttggcaggataggaaaaatgcttgcaaaaatgatgaaatctcttaatgcacaggtcacggtaagcgcaagaaacgaagtcgattttgcgtatatagaggcactcggctgcaaacacatcaacacaaatgctctcaaaagcgtaaagggatacgaccttgttttcaatacaattcccgttatgatttttgacagcgacttgcttatgaacacagaccgcaacaccattataatagaccttgcctcacttccgggaggagtggattttgaggcggcacgcaggtacaaaaccgatgccgttcgtgccttgtcattgcccggcagaaccgcaccaaaggcagcgggagaaattatcagaaaaacgatttttaacataatcaaggaggtttacaggtgacaaaagcaaccattggctatgcaatgtgcggttccttttgcaccttttcacaagcctttgaacaaatgcagaagcttgttgattcaggctacagggtacttccgataatgtcaggtaacgcctactcaacagatactcgatttggcaaggcagaggaaatggttaaaacttgcgaggatataacaggagaaaaggtacttcacacctcggtgcagacagagccgataggaccgaaaaaaatgtgcgatttacttctgatagcaccttgcacaggcaacacacttgcaaagctgtcgctcggcgtaaccgacacctcggtaacaatggcggcaaaatcacatctgcgtattctgcggcctgtacttttgtgcgttgcaacaaacgacgcgctcggagcgtctgcgcagaacataggcagacttatgaacacaaagaacatttattttgtcccgatgaggcaggataattgtattaaaaagccaaattcacttgtggctgatttttctaaaatagaagaatgtgtagagcttgcactgcaaggcaaacaacatcagccgatatttatatgatacaaaacgacagttccgatttctgaataagtcagtcaaaaacggaaaatatacaaaacgaccctttacggtataatgcaatcaaaattaccgtaaaggggatttttatggcaaaaaagtgttttttataaataattggcacgattgccgatatattctaaagacagaaaagaagagaatgacttatgaaaaagataatttttgataatattataaaatatattgacaaataccgcaaaacgcagtaaaatttagataaaaataacagcaaatctttcaaaaatttttgctattattgagaattattttcttttttatctgttaagccgagtatataatcggtgctggtttcaaaatgctttgcaagggcgattagtatagatgtaggtatatcacgctgaccgagttcgtaattactatatacttgctgagaacagtgaagaatagcactcatttgtttttgagtcaaatcggcgtcttcacgcaattcccgtatgcgtctatacataattgtatcacttctgttttagtatagcataccgcacattgttgtattaataattactgcaaaatgcagtaattattcaggctttaacaaaaaatattttttacaaaggagagattgtaatgaaaaaagcaaaaagattaacagccgtaatactgtctgcacttatggcagtaagtgcattttcagcactgcctgtaagtgcggctgaggttgaaagtaatacttcggctgtgtcttcagatgaaaattttataagcggtgactatgagtattcattacttgatgacggtacaattgagatatccaagtatgtgggtaatgatagtgatgtaactattcctgatgaaattgacggaaaaaaggttacgagtataggtgaatgggctttttccagccttttaaatttaaccaatataactattccaaatagtgttataaatattggaaatggtgctttttccggttgcacaaacttaacgaatataacaatgccaaatagtatcaaaagtataggagaaactgttttcttaaaatgccaaaacttagtaaatgtaacaatacctaacagtgttacaagtattggtacttgggctttttcaagttgcaaaagcttaacaaatataacgataccaaatagtgttacaagcgttggtaggtttgctttttatggttgtgaacatttagcaaatatagcaatatcaaataatattactgttattggaatggatgctttttatgatacagcctggtataataaccaacctgacggtatgatagtggcaggtaaagtgttgtataaatataaaggaagtatgcccgaaaacacaaaattaattataccgaatgagattgtttcaattacagatgaggctttttatgattgtgaaaatctctcaaatgtaataattccaaacagtgttgcaagtattggaaatcgtgctttttatggttgtgaaaatctattaaatgtaacaattccaagtagtgttgcaaatattggtcatagtgcctttgaatattgcgaaaatttagaaagtattaatattccttatggtattaaaagtattgaagatggtacttttaaggactgttcaaatttagtaaatataaccattcctgagactgttacaagcattgcctcccatgcatttgaaggttgtatgcgattagaaaatatatcaattcctgatagtgttgttgatattggcagatatgcttttaattgtacagaatggtatgataatcaacctgatggaattgtatttgcaggtaaaatattatataactacaagggtgatatgccgaaaaacacagatattattatttctaacggaacaaaagctatttcacagggtgcctttagtgattgtgtgaatttaagaagtatatctatttcgaacagtatttcaaatatcagtagtgatatgtttagtggttgtacaggtttaacaaatgtattcattccaaatacagtcactgaaataggttataatgcttttgaacattgctcaagtttaaaagatattaatattccgaacagtgttacaagtataggaaacagtgctttctattactgtacaagtttggaaaatatagtcatccctgttggtactaaaagtattggaagtaacgctttttacggctgtttaaatttaagtagtgtaacgattcctaacaccgttacaagtattaatgaagcagtattcgaagattgtacaaaattaaaaagtatagtaattcctgaaagtattaatgctattaagtcgtttgctttttctggttgtacaagtttaaaaactattataattcctaaaaatgttaattttttgggacataattgtattggttattattatgatgaagacagtcacgattacttaaaaattgaaaattttaaaatttacggttacaaaaatactgcggcagaaaagtatgctcaagataatggttttgaatttataagtcttgcagatgatataatattttctgataaatctacaggtataaccgtcagtggtgttatgcaaaatgatgctgttttaaatgtaactaaacttgaaaacacatttaaaaattcagttgcaacatatgacataaccttgcaaaaggacggtgctgttattcagcccgacggtacaattactgttaaaattccaagcagtgcagaaaattgtaaagtaatgtggctaaagggtgacggtacagccgaagatatgaatgcaaaatatacagacggctgttatgtatttaccacagaccatttaagcgtttatgcattggtacaggataaaacaattctcacaggcgacgcaaaccaagacggcattgtaaatgtaaacgatgttacatacttgcaaatgcacattgcaggcaaaaaaaacaccgacggttcggcgcttattgacgaaacaaacaagcagttgtttgactgcgttgatatgaacaaagacggcaaactttctgtttctgatgtaacagcattgcagattcatatttcagaaaataactgataggagagattacaatgaaaaatacaaaaagaataacagcaataatattatcagcattaatgaccgtaagtgcattttcgactttatctgtaagtgcggctactgttgacagcaatgcacctgttgctttggcggatgataatttagtaagtggagattttaaatactctgttcttgatgacggtacagttgaaattgctaggtatgtaggtagtgatactgatataaccattcctgatacgatagatggcagagatgtcgcaagtataggtgatgaatcattttcaggtatgtatatctttgaccgtgatgttataataaccgttaatcttcccactacactaaaaaatattggggaaatggcattttgggatgataatataaaggaaataactattcctaatggcgttgaaacaatcggcgacggtgcttttggcggtacagctttagaaaaactgtttataccggagagcgttaagtactgcgaccatttattcgattttaatagactaaaagaaattactgttgacgaaaacaataaaaattattacagcaaagatggatgcttatttagaaaatcagataatgttctcttattctatcctaatggtaatgaacgaaccgaatacacaattcctgacggaacaacagggatagattattatgctttctttagaggaacggcaaaattaaagacattgactataccgggaagtgttaaaaccttaaaaaagtggacagctgctcacagtaatcttgataaagttattttaaatgaaggtgtggagagtattttgaaacatgcctttgtaaattgtaattttaaggaaatatatattcctaaaagcgtaaccactattgaagaattagcttttggatatgataatatggacagcttgagtcctcaaaaaattgaaggctttaaaatttacggctacaaaaatacagccgcagaaaaatatgcacaagataatgaatttgaatttattgcattggatgatgaagtcgttacaggcgactcaaaccaagacggtatagtaaatgtaaacgatgttacatatttgcaaagacatcttgccggcagcttaaatacagatggttctgcccttattgacgaaacaaacaaatcattatttgattgcttggatttgaataaggacggcaagctcaccgttgcagatgttactgctttacaaatttatatttcagaaaataactgataggagagattacaatgaaaaatacaaaaagaataacagcaataatattatcagcattaatgaccgtaagtgcattttcgactttatctgtaagtgcggctactgttgacagcaatgcacctgttgctttggcggatttccaaagtcaaaacgatattaagtggaatattgatttaaacggaacacttcacattagtggaagcggaattatcaacgaagatgaatcaagttatgacgaagaaggaataccttggtatgaggaccgcaatcgaattaagaaggttatagttggtgagggtattacaggtgttggaaattatgcgttttgggattgctgtaatcttgaaagtatagaaataccggaaagcgtaacatatattggtgtgttttgctttttgctcgatactaagctttatagtataaatgttgatagcaacaataaatattactcaagcgtagatggaattttgcttaataaagataaaacagaaattgtaaaatatcctaataaaatgcaaagtacttatgacataccaaacaccgttactgacatattgccatatgcgttcagagatgatacaaatttacagtatatatcgttgccgcaaaacataacaacagtgggctacggtgcgtttatggattgccctaatttggtaaaggtgactttaccaacagaattaacaactatcgattctgacgcatttggatacttgtttagaatgggtggaaatatacatgtaaatgattttaaaatttacggctacaaaaatacagccgcagaaaaatatgctcaggataatggatttgaatttattgcattggatgatgaagtcgttacaggagactcaaaccaagacggtatagtaaatgtaaaggatgttacatatttgcaaatgcacattgcaggcaaaaaaaacaccgacggttcggcttttattgacgaaacaaacaagcagttgtttgactgcgtcgatatgaacaaagacggaaaactctccgttgccgatgtaacagcactacagattcatatatcacagaataattaaataacaacaaatcctttcttgataaggcggcaggcacagacttgccgccttttgctttgtgtgtgaaaaatttgaattttgcgtaaataaaaaaataattcctataaaatcacaaatagtttacggtgaggtattgctacatatgcttttttgtgataaaatggtaaataatacgaattgcaaataaattattgtgatattttttataaaaaaaggaaacatttttatgaagctatgtactaaatgcaagcatttgcacaatgatgaggacgcagtgtgcagtaactgtaattctcctcttgagagcattaccgacgagaatactcccgtatatctcctttctgccgagggatttgagcttgagcgtgttaaaaccgcacttgaagacaattctatcccttgcgacagcgttattaaggacaaacagcttaaaaagcaggaatttataaataaaaattctgccgaaagcgatattttggttccttatgccgcatatgaaaaagcctacgatatatgtataggaatcggcgcaattaaagaagatgatactcaggttcttgaagatgcggttgagcaaaaaggcagtaacgagcctactcttgacgaaaaattcgaggagatgagcggcgttaaacgcacaactgtgagagttctttcagccattgcttttcttgcgcttgttgctcttgcagtgtacggcacagattttataacgggttttataaaaggtttatttggttaaattaattattttggaggaaaaactatgaatattgaaacaaaatgcgtgcaggcaggctggcagccgcacaaaggcgagccgagagaattgccgatttatcagagcactacttttaagtacgacacaagcgaagaaatgggtaaactctttgaccttgaggcagagggatatttttacacaagacttcaaaaccctaccaatgacagcgtagccgctaaaatctgcgctatggagggcggcgtggctgcaatgctcacttcaagcggtcaggctgcaaacttctttgctgtgtttaatatctgcgaggcaggcgaccatcttatcgcctcatcttcaatttatggcggtacatacaatctctttggtactaccctcaagaagatgggcattgaatgcacatttgtagaccaggatctacctgaagaagaacttgccaagctctttaagccaaacactaaggttgtattcggcgaaacaatcactaatccgactgtttctgtttttgatattgaaaaatttgcaagacttgcacattcgcacggtgttccgcttattgtagacaacacatttgccactcccgtaaactgccgtccgtttgagttcggtgcagacattgttactcactcaacaaccaagtatatggacggtcacgcaacagcggttggcggctgtattgttgacagcggtaattttgactggcttgctcatgctgacaaatatccgggacttacaactcccgacgattcataccacggtattgtttatgccgagcgtttcggtaaggcggcttacatcacaaaggctacttcacagcttatgcgtgacctcggtgctattcagtcaccgcagcacgcttattacctcaatatcggtcttgagtcacttcaccttagaatgaaaaagcattgcgaaaacgcacttgccgttgcaaaatatcttaaaaacaacgaaaatgtagcgtgggtttcctatcctgaccttgaagacgacaagtaccacgagcttgctaaaaagtatcttccgaacggttcttgcggtgtacttgctttcggtatcaagggcggcagagaagaatcaataaagtttatggattcgcttaagtttatcacaatcgttactcatgttgccgacgcaaggtcatgtattcttcaccccgcaagccacacacaccgtcagatgacagacgaacagcttattgaggcaggagtagctcctgaccttatccgcctttctgtaggtattgaaaatgcggatgatattatcgcagaccttgcacaggcgtttgaaaaaatttaaaaattatactcgggagttgattttatgtcagcttatgtttctgctgtaatagttgcggcgggcggctctgtaagaatgggaattgcagacagcaaacagtttattccgcttcttgacaagccggctattgaatatactttaaaagcatttcagaaatgctaccttataaaagaaattgttatagtttgccgtgagcaggatgttgaccgcattaacgaacttgtaaatcaaaacggatttacaaaggtcagcaaagttgtgctcggcggttcttcacgctccgcaagcgtgcgcaacggcattaaggcggctaatgaaaaggcaaaatattttgctattcacgacggcgcccgtccgcttattactgttgacgaaatcgaaagagttgttgaggcggcttttgaaaccggtgcggcaaccctcggaacatccgttacggatacaatcaaaatcgttgacggatttaataagattgagagcacaccgctccgctcacagcttagagcagtgcagactccgcaggtttttgaaagagatttgtatatgtttgctcttgaaaatgcaggagaaaacagccttgaatttaccgacgactgcgctcttatcgaaaatatgggcggcgaagttctcgttgtaaagggcagtgaagaaaatattaaactcaccactcccgtagatgtaattcttgcggaaagcatacttaaaaaccgcattaagaacggtaatttctga

SEQ ID NO: 1114 - DNA, 24943 bp, unidentified
  source 1..24943: mol_type = unassigned DNA
gctttcagactgtggcacctataatatgatgataggtgcggcagacatgggaacaggctgtgatacaatacttgcgcagatggcggctgaggtacttgactgcgagccggatgatataacagtgtttggagcggatacagatgcttctccttatgactcgggttcatatgcctcatcaaccacctacatcacaggaatggccacacagaatgcagcacttgagcttcgtgaaaatataaagaaaatcggtgcacagctgctgggctgtgctgcatcagaggtggatttcgatggtaaagaggtgtatatcataaatccggacggtgcagacaatggggcagtttccgtaagtctttccgatatagcaacaaaatcacaggtcaacaacacgatacctgtagatgtcaccgccacatattcatcacctgtctcaccgccaccatacatggtaggcatggtcgagatagagcttgataaggagacaggagcagttaaaatacttgattatcaggctgtcgtggactgtggaatcccggtcaatccaaaccttgcgcgtgtacagacagagggtggcataggtcagggaatcggcatggcactttatgagaatgtcacctacaatgccggtggtaaaatcgcagaaaatgatttcatgcagtacaagataccgacacgacaggatgtgggacatatcaacgtcgaatttgagacaagctatgagccttcaggcccatttggagtcaagtcaatcggcgagatagttatcaatacaccggctcctgcgctggcacatgccatttatcgcgcaacaggcgtatggcacaggacagttccgtttaccccggagaaaatacttatgggaatggcagaccctgactggcacgaaaaggacctaagagtgaaatgattcatatcatatacatggcggctggaaacagccgccgttttggaagtaacaagctgttttatgagctggatggaaaacctatgtacaggcatctgcttgaacgtttgatagaaattaaagatagatataataaattaaaaaatgcagaatcgaataacccggtcatagatataaccgtcgttacacgttatcgggaaatactggactactgctcatctatccccgattgccatgcagtcttaagtccggacagcgaaaaaggcatatcctacaccataaaagcaggaattatggcggtgcaggagcagaaaaagactggtatgcaggactactacatgtttgcagtagctgaccagccatatttaaaaagtcaaagcgtgattaaattaatagataaagtgcttgaaaataaaggaaatatgaaatcagttttttcacttcgctgtggagataccgtaggtaatccgtgtgtatttcattcatcgcttatcccgcagcttttatcactggagggggataagggtggcagaagtgtggcaaagaagtatgactgtgtatatgtggatatcgcagatgagcgtgagctgacggatatagataccttatcaaattcaaaacataccgtgacattataaaagctattatgaaagagcactgtatcagtgcatatcgaatgtatattttattcaaattcccatatactacctccaaagcatgaatgcaaatgcaaaaaagtaaccggaggacaataaagtgaaaatcacaggattgaccagaagagtagattccctcggcagaatagtcataccaaaggagcttcgcaggatgctgcatataaaagagggaagcccactggaaatatatatggatgcggacgagacgatagtgctaaagaagtattcgcaggtgggaagcctgaagaatatatcacaggcatatgcccagagcctgtcaaaggtaacaggagccatggtatgtgtggcggatagggatgagataatagcggcagccggcaaaaaccacaaaaattatataggcaaggctttgtcaaaagagctcgagaatattatggataagagaaaaagtgcattgtacagtaaaaaagacgataccctgatacctgtggtaaaggacgataaagctgactgtgaagcgcaggcaatagcagtaatagtgcatgatggtgatagcgcgggagccgttatactgtgtgtttacgatgaaaaagccgataagtctgagattgccgaaaagctggcgggtgcagcagcagaatttctggctgaccagcttggctagagatagcaaaaagcattgtaaaaaactatttacttgactacaacagtaataaagatgtaaaatagcttgataaagggagcaattagcttccttttgtgctataaaggtataatagaaaattaagcaattattaattatctgatgtagaggcattgtagtataatagacagtacatattggatatagttgtcaattatctataaagtatgccgatatacaatggtataccgatagtttggaggtaacgtttagaaatggcaaaacagaaaaagaaaaagaagaaaaagcagcatcgcgttttctggtttttcataaagcttcagatttttctgatggtactgatacttggtggattatgcttttattactttggaggctatgcagacaaggtggcgaagcttcactcagaggcagtagagctcgtgcagaaatctgacaaaaacacatttttaccggcgcgcacgagtacactctacgatacaaacggtgatgagatatcagagacggccactaccaaaaaggctgactatgtgaagtatgaggatataccgcagaacttcgtaaactgcatggtcagtatcgaggacaagaagttctataagcacaatggtgtggacctaaaggcaatagtgcgtgccgcaaagtcaattataaaaaacaagagaattacccagggtggcagtaccatcacgatgcagctcgcccgaaatatttatctggatacgaacaagaactggcagcgaaaagtcaaggaaatgttcatagcgatggcgcttgaaaagaaatattccaagaacgatattatggagttctacctgaataatgtctatttcatgaacggatattatggtattcaggcagcgtgccatggctattttaactgtgagctttcggatcttgatttgtcgcagactgcctttttgtgtgcgattccgaacagcccgacatactatgacccgataaacaacaaggatcatacattgacacgtcgcaatctcatattgaaaaatctaagggaagatggcaaaatcacacagcaggaatatgaggccgccataaacgaggagataaccctcaacatgcctgagaaggatgacacggtcaagtacaattatgtggatacctatgcatattactgcgctacgagggcgctcatggagaatgagggcttcaagttcaagtattactttgactcagacgatgaagaaaaggagtatgatgcttcatatgatgagatgtattcatattgtcagaaaaagctctactcagacggttataagatttatacatcaattgatctgactatgcagcagcagcttcaggattcaattgacctgacgcttttggactttacagacacgaccgatgatggaacatttaagctgcagagtgctgcaacctgtatagacaacgacacaggcgaggtggttgcaatagttggtggacgaagccaggatgcggtcagtcatacgctaaaccgtgctttccaaagccatcgtcagccgggaagctcaatcaagccgctcattgtgtatacaccatcatttgagcgtggtaagacaccggataccatcgtaaatgaccacaagtttgatggaggaccgtctaactcgggtgattcatattacggtgatgtgactatcaggtttgccgttcaaaagtcactgaatactgtagcatggcagctatatgatgagctcacaccaaaggtaggcttacagtatctcaaggatatgaattttaccaatattgtaaaggatgactatgtcacagcaacagcacttggaggttttacaacaggtgtatccacactggagatggcatctgcatattcaacacttgagaacgatggaatgtacaggaatccgacatgtattaagtcgattgtggattctgacaacaatatcatatatacatcatcacagaaggacaccgtcatatatacagagacagcatcgcgtatgatgacagatgtcatgacagatgttatgaaatcaggaaccggacgtagcgctaatctggacaatggcatgccttgcgccggcaaaaccggaaccacaaacgataagaaggacggctggttctgtggctttaccagatactacaccacatgtgtatgggtaggctgcgatatgcctgagacagtcaaaaaactgacaggaagctcttacccggcagaaatatggaagaactacatggatcagatacatgctgaccttacaccaatagatttcctgccatatgcccaaatatcggatgattatcaggacagccaggatacacctgccgatgaccagacgcagaataatcctacagatcagactgtgaccacacctgatgcaggaaccaccacaccggataagacaacaacagacacgaataagacagatgctgctggtggaaatcatgaaaaaacacctactacaccatcagaaaatccatcaggtggagccggagacagtggttcagccggaggcacaggtggagctggagacagtggttcagccggagacacaggtggagccggagacagtggttcaaccggaggtgcaggtggagctggaggcagtggttcaaccggaggtgcaggtggagccggaggcagcggttcaaccggaggcacaggtggagctaccggtggtaccaccggaggcgaagcagcccagtagatttttctttgcagtgctgtcgggagttttgttctttgcagcatacgcacctgtcacgataggaaacaagatgatagatgcgctcatatattcagtgacctacaacggctcataccttgcagtagaggaaattatcacaatcatagtgatatcaatcccaccggttaagaaggcgctcgactatgtgaagcagatggcgaacagccggtagataatctatatttaaataattaaaatatgtaaaaaagagcagaataggtagaaatacttgtcctgctctttttagtattcgaaaaaagtaaaataaaacactcgaaaaatataaaataaaacattagaaaaatacaaaacaaaacactcgaaaaacataaaataaccttgtataatctgtgaattaaatggtataataaccatgaagggagcagatatttatggaatatataagcagaattgttgatgatgtgatagatagaaaaacagaggcatttaatgcagtgagcatcacaggaccaaaaggatgtggaaagacaagaacagcaagagaacgatgtaaaactgttattgaatttcaggatgaagacaagagagaggggtatcttgcagtagcagaaactgcacctaagctctttttaaagaatcctaagccaatactgtttgacgagtggcaggatgccccaaagatatggggaacaataagaaaagcgtgcgatgacaatccggagagtgtaggagagttttatctgacaggctcatcaagtaagaagattaatacaccccatacaggtacaggacgaataacagaggttacgatgtaccctatgactttgtttgagacaggagaatcaaacggaagcatatcgttgtttaaattattagaagatgaagcatatgatattgatggacttaccacagatataaagcttgaggatttgttttttgcggtctgtagaggtggatggccgagatgcatggcactttcaaaggacagtgcaaagcttgaaatagctaaggattattataggcagatttatcagaaggacatatcagcgattgatggagtaaacagaaatccggaatgggcaaggacactgctttggtcgtatgccagaaatatgggtactacagcaaaacgcaagaatatattttcagatgtaaaagccacacagaatgttacagatgtaacgctttcttcatatatagatgctctggagctattgtatgttgtaaaggatatagatgcctggacaccgcatttgcgttcgaaaacagctatcagagctgccaaaaagcatatatttgttgatccctctataggattggctgcgcttggtgttaatccggactattttatcaacgatttggatctatttgggcatgtatttgaaaatatggtgcttagagatttacttgtatttgctgaaaagcacaatgccagagtgatgcattatacagatgatatgggcgtagaagcagatgcagtctatcagttggaggacggccgttatgcgcttattgaaataaaaaccggggtgaacaagattccggaagcggaaaaatccttgctgcgattcaaggatattatcttaaaatataatgagaaagcattggaaaaagaaaaacatccacgtgatgtatataaagaaccatcggcactgattgtgatttgcgcaaatgcaaccatggcatataccacggagtcaggagttcgggttgtgccggttgggtgtttgagagattaatatagagcagactgtaaaattgagctgaccactcataattacagtctgttttttagtgtatattattgtcacagtgtaagggagcaggcgggcagaaaattgcccatccaatgagtttgtacgaagctgcttagaggctgttggaattgtaataggtacacagcagcgcacgtgcatggaagcacgggcgaggcgttgccgcgctaaggacggcgcgtaaaagccggctgcgtcaggcatagaaaacctgacttacaattcttacagcctcttggctgctggtaggagacgttttggatgggtaattttctgcccgcctgctcccgtaccatataaaaaatgaaaaataaaaatactttgacttgacaactatttaaaatgtgatatactttcactgtcaaatgatttgatgatgaaaatatttgacatgcaaactagtgcaaatataccagcacacaaaaccgaaaataaacacagaaaaaggagaacagaaatatgttggagaaaatcaaggaaatcgtagcagatcagttaggaatcgacgaggatgatatcaaattagagtcaaacttcaaggaggatcttgaggcagattcattagatcttttcgagcttgtaatggcactcgaggaggagtacggagtagaaatcccttcagaggatttagagaaaatcgcaacagtaaacgacatcattgagtatcttaagaacaaaggtgtagaggcttaaaagacatggaaacaagaataacaaagcttcttggaatcaaatatccggtcattcagggtggcatggcatgggtagcaacccatgagcttgccagcgctgtgtccaatgcaggcggacttggcatcatcggagcaggcggagccccggcttcatgggtaaaggagcagatagtcgctgcaaagaaggagacagataagccgttcggagtcaacctcatgcttatgaatccggaggccgatgagatagcaaaaatcatcgccgaggaaaaggtaaaggtagtcaccaccggcgcaggaaaccctgcaaagtacatggatatgtggaaagaagcaggcgtcatcgtaatccctgtagttgcaagcgtagcactcgcaaagctcatggagagaggcggggcaagtgcggtaatcgccgagggaatggagtcaggcggacatatcggagcacagactaccatgacacttgtgccacaggttgttgatgcagtgagcatccctgttatcgcagcaggcggaattgcagacaacagaggcttcaatgcagcatttgcactcggtgcagaggcagtccagatgggtacacgctttgtcaccgcaaaagaatcgatagtacatgaaaactataagcagaaggtcattaaggccaaggatatagattccgaggttacaggaatgagcacaggccatccgatcagagtgctcagaaacaagatgaccagacaatatctcaagctggaaaaggaaggagctccatttgaagagctcgaaaaaatgacacttggcgcactcagaaaagccgttgtagacggagataccgtatatggcagcgtcatggcaggtcagagcgcaggcctcgtaaagaaagaggaaacctgcaaagaaatcattgaggatgtagtgggactgaacaaatagacagtattcacttttacatgcaaatttaaggataccgggccgcctgcaaagagtggcttacggtatcctgtcagaaataaggagaaaccgaaaatgggtaagagagtatttatgtttcccggacagggctcacagtatataggaatgggtaaggagttttacgatacaatgccaaatgcaaaggcagtaatcgaccttgccagtgaacagacaggcttggatattccggcattatgctttgaggaaaatgacaagctgaacattacagagtacacacagatatgtatgcttgcagttgaggcagctatatatcaggcaatcattgacaaaggtatcacacctgatgtcacagcaggcttaagccttggggaatatggtgctctcatcgcatcaggagccatgactatggcagatgcattcgcagttgtcagaaaaagaggaatctacatgcaggaggcagttcctacaggtggagccatgacagcggttttaggacttgatccgcagatcattgaggatatctgcaaaaagacagcagatgagacaaattcagtggtatcggtagccaactataactgccagggacagattgttatcacaggagaaaaggcagcagtagatgccgccgcagcagcatgcagcgagacaggcgccaagagatgcgtaccgctcaaggtcagcggacctttccactcagcaatgcttaagggtgcaggagaaaagctcgcagatgcacttgagagtgtagaaatccacgatatcaaggtgccatatatcacaaacgtcacagcagactatgtgaagtcaccggcagatgtcaaggattatctgacacagcaggtttcatcgtcagtacgctggcagcagaccatcgagcgccttatcgcagacggtgcagatgagttcgtggaaatcggaccgggacgatcactcagcggatttatgagaaagataaatagagacgtaaaagtcgtaaacatagacaaactggaggattttgaaaagtatgttaacaggtaaaaatgccctggttacaggcgcaagccgcggaattggaagacagatagctcttacacttgccgcagcacacgcctttgtaatagtaaattataatggttcaaaggaaaaggcagatgccgttgttgcagagataaaggcagcaggcggtgatgcagtttcttatcagtgcaatgtatctgattttgacgagtgccagaatatgataacagcgctcatcaaggagtacaagcacatagatatcctcgtaaacaacgcaggaatcacaagagacggtctcatcatgaagatgagcgaggcagactatgacgcagtgctcgacacaaaccttaagggtgcgttcaacacaatccgtcatatgtcacgctatttcttgaagcagaaatcaggaagaattatcaatatttcatcagtttccggaatactcggaaatgcaggacaggccaactacagcgccagcaaggcaggagttataggactcacaaaggctgtagccagagagcttgccagccgtggaatcacagcaaacgcagtggcaccgggctttgtagagaccgagatgacagatgtgcttgccgatgcggcaaaggagaatcttttatcacagattccgcttggcagaccgggaaacacaaaggatatcgcaaacgcagtattatttttagcatcagatgcagcaggctacatcacaggccaggtgctgtctgttgacggaggaatggcaatatgagtagaagagtagttgtaacaggacttggagcagtaacaccaatcggaaataatgtggacgatttctggacatcggtaaaggccggaaaaatcggatttgaccacatcacaaaatttgacacaacagattataaatgtcacattgcagcagagcttaaggattttaacccgcaggattttatggacagaaaggctgcaaagagaatggagccattctcacagtacgctgtggctgcagcaaagcaggcaattgatgatagcggacttgatatcgaaaaggaagatccatacatggttggatgtgccatcggttcaggtatcggaagtcttcaggctatggagcgcgagacacaaaagctttatgaaaagggcccaaacagagtaaatcctctgcttgttccgcttatgatctgtaacatggcagcaggaaatgtttccatccagttcggtctcaagggaaagagtatcaatgatgtaacagcctgtgctacaggaacaaacacaatcggtgaggcatacagaagcatccagtacggtgaggctgacgtgatggtagccggtggtacagagggcagtgtatgtcctatcggaattgcaggatttacagcacttacagcgctttctacagtagatgatccggcaaagtgctcacttccgtttgacaagaacagaagcggctttgtaatgggtgagggcgcaggagtagttatccttgaagagcttgagcatgcaaaggcaagaggtgcaaagatttatgcagaggtagtcggatacggctgctcatctgatgcataccatatcacatctccgcaggaggatggcgcaggcgcagcaagagccatgaccaatgccatgagagatgcaggtgtcacaccggcagatgtaaaatatatcaatgctcacggaacaggcacacatcacaatgatctctttgagacaagagcaatcaagcttgcgttcggtgatgaggctgcaaatcttaaaatcaattcaacaaagtctatgataggacatctgctcggagcagcgggagctgttgagtttataacatgtgtgaaggaaatccaggatggatttatacataagactgttggctatgagactcctgatgaggagattgacctcaattactgcaaggacagctatgaggagcctgttgagtatgcactgagcaattcactgggattcggtggacataatgcaagtattctgctcaaggcttataaataaatagcttctgctttttagggcttcgcgaatttagactgtgaggtccggtggagcacacagtatattcctcataaaaaatatgaagtcagtcacggcattttgcacggacaggctgtgatatggtgttagtgcttcatgctattggagtggatggaacgccgtgacagttcatattttttattcagaacacactgtgtgcttcccggctctactttgttgagcgcgaagcatgtagataaattgcttctgctttttaggggcttcgcgaatgtaggctgtgaggtccggtggagcacacagtatattcctcataaaaaatatgaagtcagtcacggcattttgcacggacaggctgtgatatggtgttagtgcttcatgccattggagcggatggaacgccgtgacagttcatatttttcattcagaacacactgtgcgcttctcggctccacgttgcggagcgcgaagcatgtagatagtttagagcgaattgagaaaggatagatgtatatgtcaattatgaatacgcagcagattatggatattctgccgcaccgcagtccgtttcttctcattgatacggttgaggagctgcagccgggcgtaaagtgtgtggctaagaagaatgtgactatgaatgagccgcattttatgggacattttccgagaaatccggtgatgccgggagtgcttattattgaggctttggcgcagaccggtgcagttgccattctttgtcaggatgagtggaagggcaagactgcatattttgcaggcatcaataatgccaagttcaagcagaaggtggttccgggagatacgctggagctgaccactgagattataaaggttaaaggtcctatcggtgtgggcaaggctgttgccagggtaaacggcaaggttgcctgtatggcggagcttacatttgcaataggttaattgcataaggagacaagatgaagttattcaagaagaaagataaaaatatagaggctgaagagactttagccaagaacgctgagagcgcaaaaacagtcgcagatggcaaaaatgccggtgcagcacaggaaacaaaagaggatgtccctgagacaatcgtttgtcccaagtgtggcaagactgtgctcaaatcagttgtaaaacagcacaaatacgtctgctatgagtgtaattattatttccgtgtgcgtgctaaaaacagaatcagaatggtttccgacaaggaagcatttgagccatggtttacagagcttacaacaggaaatcctctcaatttccctgagtatgaggagaaaattgcaaagactcaggagaaaacaggactttctgagggcattgtcatcggtaagacaaagatttacggcgaggagacagtgcttggtgtaattgattcaagatttatgatgggaagcatgggtcatgtggttggtgagaaaatcacaagcgcatttgagcgtgccacagaggaaagacttcctgttatattattctgctgttcaggcggtgccagaatgcaggagggtattatttcgctgatgcagatggcaaagacctcagccgcagcaaagcgtcattcagaggcaggacttttatatgtgcctgtactcacagatcctacaacaggtggtgtgacagccagctttgcaatgcttggagatatcattcttgcagagccaaaggcacttatcggttttgcgggtcctcgtgttatcgagcagaccatcggacagaagctgcctgagggcttccagagggcagagttccagcttgagcacggctttgtggatatgatagttgagcgtgagaatttaaagaagactctttacaagattttacgtgctcacagacctaccactggctatgccaattttgacccgcttcactcagacgacaattacgagccgacagagcttatgaaggagcgcgaggcaaaggccaagccatttaaggtatgggacaaggtcagcgccgcaagacagattaagagacttgcatcggttgactatatggactatatctttgatgagtttatggagctgcacggagacagatatttccgcgatgacccggctatcgtaggcggaattgcatatttagacggccagccggtcacagttatcggtgtccacaagggaaaagaccttgaagactgcgcaaagagaaactatggtatgccatcacctgagggctaccgcaaggcactgcgcctcatgaagcaggcagagaaattcaaccgtccgatcataacctttgtcaatacatcaggagcttatccgggaatggaagcagaggaaaacggacagggtgaggcaatcgcaagaaacctttatgagatgagcggcatcaaggtgccaatcctttgtctcatgataggagaaggcggaagcggcggagctttagctctttctgtaggaaatgaagtgtggatgatggaaaatgccacatactcaatcctttcgccagaaggctttgcatctatcctctggaaggacggaaagcgtgcaaaggaagccgcagaggtaatgaagattacagcacacgacttaaaggagcttgatgtcgtggatgatataatacctgagtttggcggagccgacgaggatgccctttcatcaatcggaaactacatgaagggcaacatgaagaaattcttggaaaaagaaagcaaattgacaaaggaccagctctgggaggaaagatacaagcgtttccgcaagttctagtcccggaaaggaaattctatgaagatagttggaacaggaagctgcctgccacagagagtggtctcaaacgatgacctggcagccataatggacacatctgacgagtggatcagctcgcgtacaggaataagaaacagacacattgcaacgactgagacaaccacctcacttgcctgtgatgcagtaaaaagtgcgctgcaggatgcggggattgacggaagtgagatagacttgataatagcggcaagcgtatccacagacaaaatcgttccatcgctcgcatgtcagattcaggctgagataggtgcaggcagtgcagtggcatttgacataaatgccgcatgttcaggctttttattcgggcttgccacagcggatgcatattttaagaccggcaggtttcacaaggcagtcgtagtgggagcagaggttctttcaaaaataatggactggaatgacagaagcacctgtgtacttttcggagacggagcaggagcagccgttgtgacagacgagggcgatgcttttaagggctttgtacagggctcggacggaaaaggcggtgaggcgcttgacggagacaaccgtcctgtagtcaatccgtttaccgacaatggaaagcagtctgcactcggtggctatgtcactatggacggtcctgctgtatacaagtttgcggtaaagacagtgccaaaggctataaatgagctgcttgatgaaatcggctggagcgtagatgatgtggatgtctatgtgttgcatcaggccaatatacgtattattgagtcggttgccaagaggcttaagcagcctatggacaaattcccgaccaatttacagcattgtggaaatatttctgcggcaagtgtgccgattttgcttgataaagtccgcaaagatggtatgataaagcatgaggaaaaaataattttatcaggctttggagcaggacttacatggggagcctgcgccatagagtggcaatagaaagaggtatttatgacggcagatgaaactttaaatgaattattggtgtgtctgttcaaggatttgacagagatagagggcagatgtctgataacagacgaattttctgatatttctatcaacgatatgcatataatagaggcaataggagtcgatgagccaaagcgctccggcaccgtagccaagcttatgtctatcactctgggcacactgacaaaggcaatagatggtctcacccgcaagggatacgtgaaccgtatccgcagtgaggaggataagcgtgtggtaaagctctcactcactggcaagggaaagagtgcatactatcatcatgagcagtttcaccgtcatatgatagagcatataaaggacggtctttcggatgacgaaatgaaagttcttataacttcacttgcaaaactctcggattatttcaaggtggtatattccgatgatgaggagaatcagtaccaaaactgggataatataaatgaagataataaataaaatgaattttttttatataaaactttcaaaaattacttgattatagcaatagatttatataaaataaacttgttgatgtgaaaaataattttgtaaaggagatataaaaatgagctatgttgatgaagtactcgaagtagtaaagaagaaaaacgcagatcagcctgagttcttacaggcagtaacagaggttcttgattctttaagacctgtgatcgatgcaaatgaggaattatacagaaagaatgcgattcttgagagaatcacagagccagatcgtcagatcatgttcagagtaccatgggtagatgacaatggtcaggtacaggtaaacagaggtttccgtgtacagttcaataattccattggaccatacaagggaggtttaagacttcatccttctgtaaacctgggtattatcaagttcttaggtttcgagcaggtatttaagaattctcttacaacacttccaatcggtggtggtaaaggtggttctgatttcgatcctaagggtaaatctgacagagagatcatggcattctgccagagcttcatgacagaactttgcaaatatatcggagcagacgttgatgtaccggccggagatatcggaacaggtgcaagagagatcggcttcttatttggacagtataagagaattcgtggatcatacgaaggtgtgctgactggtaagggtcttacctatggtggatctcttgcacgtacacaggctaccggatatggtctgttatatcttactaacgcattatggaaagatcatggtatgagccttgagggaaagacagcagcagtttccggatctggtaacgttgctatctacgcaatcgagaaggcacaggaattaggtgttaaggttgtaacatgttctgattctaccggatggatttatgatccaaacggaattgatgttgctcttcttaaggaagttaaggaagttaagcgtgcccgtcttactgagtatgcagctgctaagtcaactgctgagtatcatgcaaagcagaacggtgagcacggtgtatggcagtacaaggtagatcttgctcttccatgtgcgactcagaatgagttagacattgaggatgccaagatgctcgttgctaacggtgttacatctgtaacagagggtgctaacatgcctacaactcttgaggctacaaaataccttcaggagaacggagtactcttcgtaggtggtaaagctgccaatgcaggtggtgttgctacatcagcacttgagatgagccagaactctgagagactttcatggacattcgaagaggttgacggaaagctcaagggcattatggagacaatctacgctaacatcagtgatgctgctaagagatacaatgcaacagttggtggaaagactgactatgttgcaggtgcaaatatcgcaggctttgagaaagtagttgacgctatgcttgcacagggtgtttgctaatctgtaggcacttattgaataatgactataaaaacccctcccacagatagaagtctgtgggagggggtttgtaataatatataaaagagaaaactaatttattttttattagcaaatgctttgataccgcctgctacgaaaagtatagaggcgataataacgccggacacaagcacaatagcgtaaacattggcattcacgcagatattggaagtccagtcagaaaaattcacggactttatagtgatttgtctggtaccaaaaattaaaaactcgcatatgtcatcggcaaaagctgtccaaaccgaagctatcaaaactataattgcggattttataaatccgtttgcgtttaaatatcgtgcatcgaaaaatatgagccaggctgcaagtacaaagacaaatgctataatacagccggccttcattccggcaacatcgtttgtatgaccacatacctcaatgattgtgaggaaaagccataaggtatcccacagcatagtgataagagcttttttgtctgataaaacaggtggaagctcaattcctctgatgacaaacggaaaaagaataattgataatccaaatatagttggaacagaccaaagcataaattcatttgaactatacattctgtcaacaaaaaagaatatcaaaagcagagcaaaaacaccgcagattatgcatttggtcagttttttctgctgtgccataagtggaacaactgtcattgcagccacaagaagcatagatgctgttaccaccgcaaaggtatttaaaccatcgccatttgacagacacactatgaatgtgatgagtattgggataagcagtagtccggctattatgactccggtcttgtaggcagcagatttttcctttttctcatgctgctttaatacactgtcggcctctttttttatcattgaatcaatagaatcgttttttagctcattgtatgtattttgacatttttcacaagtcgtaaggtgtttttcaacaagctttttgcttgagggactgcatacatcgtcatagtatagtgggagtaaatcctgaactatattgcaggtttcatcggttgattgtgtaattggattattcatttctatccatcctttctttgattttcagtctggccctatggtaagttacccgtgcccagttctctgtttttccaaatatcatgcctatttgggagaatggcaattcaccaaatattctaagctgaaagacctccttgtagggctcatcaagctcgtgcagtataagatgaatctgaagagcggtatctttattttctaggctttttaccatattatcgggttgttcgagctgctcttcgtcaagctctgtaaattttgtgctttttcggcattcgtctattgccagatttcttgctatgctgcaaagccaggtttgttcgcttgatttgccggcatatgccttctttgcggtcatggccttataaaaagtattctgggtaatttcctcagcctgatgttgattttttacaattgtcattacatatgagtatacttgcaagtaataggaattgtacaatttctcataatccagaactgtcacctcctttgttcataggttagacgtagaaaggattgttttgttacaaaaaattttaagattttttaatcgatgtatgattatagcataaattttatcaaaaatgaaaataatcttgacatacaagccacaaaggattactatagttagcgtaagctaattaaataattattcttcagggcagggtgcaattccctaccggtggtatagcccacgagccgcaaggcatgattcggtgagattccgaggccgacagtaaagtctggatgaaagaagatgtgaatatgatatatgcagagtatagatagctgggttttagattcagtttcagatatagatacagcacatatcatagttataaaagatatctactctggagtgtttcatacattccggatttttttgtctcaaaattcatttatgatgaaatgcagctagtgcatattttttgagattatgatatttgaaattactaggccctgaatgataatagttcagggcttttttatgcagaaaggaactcaaatgactgatgaacaatatatgagaagggcgattgagcttgcaaaacgcggcatgggatatacatcgccaaacccaatggtcggagctgtggttgtaaaggacggcaggataatcggagagggctggcatgagagatacggagagctgcacgcggaaagaaatgcgttaaagcattgcaaggaatcgccacagggagcggatatgtatgtgactctcgagccatgctgtcatcatggcaagcagccgccatgtgtggaggcagtgatagaagccggtataaaaagagtatatgtgggctcggatgacccgaatccgcttgtcgccgggggaggtatcaaaatccttaaagagcatgggatagaggttgtcacgcaggtgcttaaagacgagtgcgacaggctgaacgatgtattcttttactttatacagaccagacgtccatatgtcgctatgaaatatgccatgacgatggatggaaagatagccacatattcaggactatcaaagtggataacaggagaaaaagcgagagaacatgtgcaaaacctgcgccacagatataaagccataatggcaggaataggaacagtgcttgcagacgatccactgcttacatgcagaattgagggcggagtaaatccaatccgcataatatgcgatacgcaccttaagcttccactggaatcgcagatagtaaatactgcaaaggaagtgccgacgatagttgcagtcagtgagcgatatcgtgaaaccgcacattcagaagccttacctgatactgaaaaagatagtatagaagaaaacaataattatcaaaaaaacagaaaaataacacggcttgaagaaaacggaatagaaattctgtatgtagctgaaaaaaacggtcatattgatttaaatgacctcatgcaaaagctcggcgaaagaaacatagacagcattctgcttgagggaggcggaatactcaactggtcagcccttaagagcgggattgtgaataaggtatacgcttacattgcaccaaagcttttcggaggggcggatgcaaaaacaccgatagagggaatgggaaccgactcaccggcacatgccgtgatgcttggaaacagtaaggtaacaaagcttggtgatgatttcctcatcgagagtgatgttgtgaatacttaaaaaagaaaggcgatacacaatgttcacaggaatagttgaagaagttggaacaatagatacaatttcacgtggagcaaactcagcagtacttacaatcagagctgaaaaagtgctagctggaacaaaggtcggagacagcatagcggtaaacggtatctgcctcacggtcacaaggctcatgccacatgcgtttacagcggatgtcatgcatgagacgctaaatcgctcatcgcttgcaaatgcgctaagaggagcacatgtcaatttggagcgtgcgatggcggcagatggcagattcggagggcacatcgtgtcgggacatgttgacggaacaggcaggattgtggaggtcaaaaaggatgacaatgccatctggtatacgatacatgccgcaccacagctcatgcgctatatagtcgagaagggctccgtcacaatcgatggaataagcctcacagtcgcaaaggttgcagaggataatttctcaatatcagcgataccgcacacggtaagccagactgtgctaaaggacagaaaggtgggagctgtcgtaaatctggaaacagatatcataggaaaatatgttgagaagctgttgtttaaagggcagtcggatggaataacagaagaaatgacaggagcacagacaattaaggaaaatgtaccacataaatccggcgaaaataaaaaacaaccggttggaataacaagagatttcctggtaaaatacggcttttaacataaaagcacgagtatcgtgtgggtttgcaaatgtgcgtggggctgaatggttaaaaaattatgtaattgaacagcttcaaaattataagagaaaggacataaaatatgaaattcaacacagtagaagaagcacttgatgagcttcgtgcaggaaaaataatacttgtcacagatgatgaggacagagagaatgagggcgatttcatctgtgcggcagaatttgccacaacagaaaacatcaactttatggcgatgcacggcaagggtctgatatgcatgccgatgtcgcaggaatatgtaaagaagcttcgttttccgcagatggtgcaggaaaatacagacaatcatgagacagcatttacagtatcaatagaccatgtctcaacaacgacaggtatttccgcaacagagcgctcaatcacagcaatgaaatgtgtctctgatgacgcaaagcctgaggatttcagacgtccgggccacatgtttccgcttcttgcaaagaaaaacggcgtactggagagaaacggacacacagaggcaacagtcgatttatgcaggctcgcaggactaaaggaatgtggactgtgctgtgagataatgcgtgaggacggtaccatgatgcgcacaacagagctcatggagcttgcaaaaaaatggaacatcaagttcatcacaatagcggcacttcaggaatacagaaagatacatgaaaagctcgttgaccgtgtcacagaggtaaagctgccgaccaaatacggtgacttcaaggcatatggcttcgtcaacagattaaacggagagcatcatgtggcacttgtaaagggcgaaatcgcagatggaagggatgtgctctgccgagtacattcagagtgtctcacaggagatgtattcggctcacagcgctgcgactgtggacagcagcttgaggcggccatgagacagatagacgaggagggcagaggaatactgctctacatgcgtcaggagggcagaggcatcggcctgataaataagctgaaggcctatgagcttcaggagcagggaatggacacactcgaagcaaacctggcactcggctttgccggagatgagcgcgagtactatatcggagcccagatattaagagagctcggcgtacacagcctgcgccttctcacaaataaccctgacaaggtataccagctctcagaatttggtatggaaatcagcgagcgagtgccaattcagatgagcgccacagcgcatgacctgttttatctgaaaacaaagcagaaccgcatgggacacatactctcatattagtacaccgcatcgagcgtttttgcaatgtgtgcggggattctgaatagtaacaaattctaaatagttaataattgcagataaactcatctgagtaaaaataaaaacataaggagaacaaaaaatgaacgtaatcgaaggaaaaatgacacaggatggaattaaggtaggaatcgtagtagcaagattcaatgaatttatcacatcaaagctcttaggaggcgcaaaggacggactcgtaagacacgacgtgccggaggaaaacatagacgtagcatgggtgccgggagcattcgagataccactcatcgcaaagaagatggcaaaaagtggaaaatatgatgcaatcatctgtctcggagcagtaatcagaggcgcaacaagccactatgactatgtgtgcaacgaggtatcaaagggaatcgcatccgtatcactcgaatcggaaatcccggtaatgtttggagtagtcaccaccgaaaacatcgagcaggcaatagaaagagccggaacaaaagccggaaacaaaggatatgactgtgcactcggtgcaatcgaaatgataaatctcgtcagacaaatcggataatataattatatagcataatggcattataacattatggctctatagtgctatggcattatagtattatagcataatctcccgaggttcaaatatctttgatatttggacctcgaatatttattatatctcaaattgtaaattattgtcacaatgtaagtggcgtaagcgccgggcatccggcagcgcacacgcactcccgagcaggcgaatagcgaagctgcttagagactgtagaattatgcccaagaaaaacagaaatgcccggccatggacggccgggcaaggcgttatgcgccatggacggcgcataaaagccggtttcgtcaagcatagaaccaccccaaggcataattcgtacagtctcttagcagcgtagcgtagcaggcgcgggagtgcgtgtgcgctgcacggatgcccggcgcttacgccacgccctcccaacaaaaaagaagaaaaatttaatatctaaagaattgcacgaaaaatctgtatatagtataatgatagttcaggaaaacaaaacggaggaccatgaattttgatagatatacattgtcatttattatacggagtggacgacggctcaaagtcgctcgaggaatcggtagagatgctcaagatagccaaaaagcagggcattacaggcataatcctcacaccgcacctgcgccatggaatgtttaagcatccgcttgaaaagatagagcgacactataaaaagctgatgccatatgcaaataagcttggaatagaattaaagctcggcacagagtatcatgtggcaaccgatatgatagatgcctttcatggtgggctgtgtcatacactggcagatacacagtatatactcacagagtattcacattccagcgaatactcgtttgtatacaagatgacgcgcgaagctatatttgcaggatatataccggtgatagcacatgttgagagatatgagtgtctcagagatataagccgtatagaggatttgcaggagctgggagcgctcatacaggtcaatgcagactcagtgctcggcatagatggcagacacttcaagagatacacaaagaagcttttgaaggcaggacttgttgatgtaatagcaagcgacagccacggcacaaaggagcgcgtctgcaacatgaaaaaatgctatgagtacgtggcaaagaagttcggtgatgactacgcgcaggaaatcatgcagaccacaccggaaaatataataaacggaagataatcagtgtaaatgcggggatacgtaatggagagagaacaggattttgacaacgagatagagatagacttaaaggatctgtttcttgagataatttcatattggcagtggataattcttgttacgatagcaacaggtgcagtggcatttgcgataagcagatttatgattacacctatgtatgaatctacatctgagctctatgtactttcaaagagcacatcaatcacaagccttgcggatatccagacaggcaccagcctgacaaatgattacatagttgtagtaaagggacgtccggtgctggatcaggtcatagagaatctcaatctgaatgagagctacaagacacttggcggcagggtgacgcttgataatccgtccaactcgcgagtactcaatatcacagtaacggatcccgatccgcagatggcaaagaccatagcagatgagatagcaaaggtcgcatcggcatatatagcggagaagatgaagcaggatccgccgaccatcatccagagcggatatgatgatggaggcgcggtaagccctaatatcggcaaaaacacagtgataggagcctttgcgggagcatttctgtcgattgcggttatagtggtttcttatctgttcaatgatacaatcatagatacagaggatgtggagaagaagctcggcatgaacgtgcttggtacacttccgcttgatgaatcggaagatgacggagagcaaggaaagggcagaaagcatggcagaggcagccacagaaagaaaagaaaaaagaaatcggcttcagcataaggaagcctgtatcaggagatgggcagatggaattagtaaaatttggcaagctaaaagaacaaagctatacgatgaaggaatc

SEQ ID NO: 1115 - DNA, 25678 bp, unidentified
  source 1..25678: mol_type = unassigned DNA
atgttcttcggtaattccatacaaaaaacacctcccatgccgtttctatcagttatcactaactatagcatccgcacaggaggtattttagcgttctttgtcgcacctcttcaaaaacagttcgacaaagtttgcaccatattctatgtattcttagctatgcttcaaacttatatacggtaacagaatcgtattctctgccgttctccccgccaaatacataggaggggaaattctcatgatgaatggtatccgggaaatactgggtctccaatgcaaaaccgcagcggttgccgtaggtcaccccatcttttccgggctgtacatcaataaaattgcctgcataaaactgcactcctggcagggtggtgtatgccttcattactctgccgctcttcgggccttttactgtggcaatatgccgtaatgtaccgtcatcgttccatccatcgatcacgaaattatggtcatagcctccggtcaggagtaactgctcataatcttcccggatgtctctgccgatcttcttgggctgtgtaaaatccatgggtgtgcctgctaccgcacgaatctcaccggtagggatcgatcctgctgccaccggagtaaagtgagaggctctcagccacagttcatgctcttcaatgctgcctgcaccgtgaccgtccagattgaaataggaatggttggtcaggttgataatggtcttcttgtcactggaagcatggtaatgcagagtcagctcattctcttcactcagagagtaggttacggataccttcttattgcctggaaatcccagctgcccatcctcatcctccagagaaaatgtcacgctgttctctcctatctccgcatcccagagtctcttatggaatcccagttgcttatgggtatgtaaattgttgacaccgtcatttttatccaactgataagtaacaccgtccagtgtatactccgcaccgccggtacggttcgcacagggaccgatcaccgtaccgaaaaagctgtcgttgccataataactttcaccgttatcaaatcccaacaccagatcatccgccttgcctgtagcatccggcaccagtacacgcaccagaatagctcccagatctgtcaccgctgccttcatacccttactattactcagggtatacagcgagatctctttaccttccgggcttttcccaaataaactttttgttactgccattgtctttccctcccacttttatccatttttatttcatgcatactgtctataattccactctgccctctaaagcgcggagtaatgttacctcatcaatatattccagatctcctcctacagggacaccactggcaattctggtcaccttgattcctgtgggcttgataagcttgctgatatacattgccgtggtctcaccttccaggctggaattggttgcgataatgacctcctccacatctccctgcaggcgctccatcagttccttcagcttgatgtcaccgggtcccacacccagcatcggagagatggcaccatgcagtacatggtacacgccctcatatttgccggtcttctcataagccgccagatctctggtgttctccaccaccataatggtacgatgatcccgtctgggattcgcacacaccgggcagagttccttatccgtcagagtatagcattccttgcaatagcggacattggctctggcttcgatcatggcgtttgccagtctgtccacacggtccttcggcatattgatcaggtgaaaagccagtcgttgtgcggacttactgccaatccccggaagggctgccagttcttctattaatttattgatctgtccgctgtagagttccattagaaaggaaatcctcctaatcctccggtcattttgcccataagttctgcattggcttcatccgccttgcgcagtgcttcgttggctgctgccacgatagcatcctgcagagtctcgatatcctcgggatccacgatctcctctgtcagtttgatggatgtgatctcttttttaccgttgatggtcacttccacagctccgccgcctgcggatgcagagaactccttggtctctaattccttctgtccctcttccatctgacgctgcattctctgtgcctgcttcatcagattgttcatattaccgggcattgcgcctccggggaatccacctctttttgccatgttactgttcctccatatcatttataattgatttctccgtgctacgcattctcgaaatcataatatattcgcatttcggactatcgtcctgcgagtgagttattattatatattaccttatctgcaagcctgccgcaatcccaaattcacgcaggatcactcttcctcatcgatctccatgttgatgaccttactgagatccacatagttgtcttcgaattctctgctgctttccaccgtctggatcgtcacttcaatctctttgctggaaaaatcggacaacagcatttccaactgctgcttgttctgttcgtgggcttcccccttgaaataatcggaagccagtccgtcctccaacaccaccatgagcttgttgtctccacccagacttaatcgggcgtttttcagatacatcttcatgggattctcggcatttcccacgatggccggccatttccgtacgatctcctggatatcctcggggaccgccttcggcaactgtggcttcggctttgccacaccggcctgcggcactccctgtgctccgggagctccggcaggcatttgcgccgccgtaacgacaatgccgttttccactttttcctccacctgacggatacgatccaggactgcttcctgatccgtctccatctccggcttacacagcttgatcagtgcaatctctaccaggatacgcttctgcgccgcatagcggatctgtccggacagttcggagaaaatatgaatatagcggataatctggtccatggacagcatggaagcttcttccttcagattcgccagattgtccgtagacatgtctatgacatcctccagattatccgctgtctgtaccaacatcagattccgcagataccaggtaaagtccgtgacaaactgtaccagttccctgccctgcatgacgatctcttccaacagttcaatgcagcctaacacattccggtccatgacgaagcgcagcaacctgctgaacacttccgtatccactgcccccagcacatccagggtcatatcgtaggtcagttctttgcccagatggaaggcaatacactgatccaacaggctcaaggcatcacgcatggagccgtctgccaccttggcaatgtagcgcagagctctgtcctccacctgtacctgctccgtgtccatcagttccttcatgcgatccgtgatggtatcaatggagattcgtttaaaatcatatctctggcagcgggacaggatcgtaatggggatcttgtgcacctctgtggtcgccagaataaaaataacataagatggcggctcttccagcgtttttaacaatgcgttgaaagctccgggggagagcatatgcacctcgtcgatgatgtagaccttgtattttccctccgcaggggaataggatacctcgtcgatgatctcacggatattgtccacaccgttgttggaagccgcatcgatctcgatgacattcatgctggctcccgctgcgattgccttacaaatacggcattccccacaggggccgtcctctgtggggtgttcgcagttcactgttttcgcaaaaatcttggccaccgtggtcttaccggtacctcttgttccggtaaacaggtacgcatggccgatccggttcgcccgcagctgattcttcaatgtcgtcacgatatgatcctgacccttgacatcggaaaaagcgtccgggcggaatttccggtatagtgctgtatatgacatgttttttctctcttccttgtaactattcagagccatcaaatattagcagatgcttggcgaaaatagttactcattcattttctgtcttaatcgccgaagcagatgcccagcagcttcgcttcctgtacgatggtagcatcgggatccacggtctttaacttgcccgctacatcctctaacggaacccttacgatctcacggttcttgtaacctaccatgaaaccgtactgattgtccaagatcagcttgcctgcctcggagcccagacggctggcgaatactctgtcataagggcaggggcttccgcctctctgcatatggccgggtacggtgacacgtacttctctgccggtcttctcctggatctgtgcagccacttcgtaagatacggaagggaacggatatttttccatctttttcttgtagtcttttttggtcagggcagcatcttccctggaaatcgcaccctcagccacagcgataatggtaaaacggcagccctttttgtccctgtcttcgatcttctcgatcaccttatcgatatcataagggatctccgggagcaggatgatgtccgcaccgcctgccattccggcattcagggtcagccaccctactttatgtcccataacttccacgataaatactctgccgtgggaagctgctgtggtatggatgcagtcgatggcatccgttgcaatatccaccgcactctggaaaccgaaggtcatatcggtgccccacaggtcattgtcgatggtcttgggcagggtcacgatattcagtccttccttgcgcaacaggttcgcagtcttgtgggtgccgttaccaccgagaattaccaggcagtccaactgcagcttataataattctgcttcatggcttcgactttattcagtccgttgggatccggatcctggatcgtcttgaagggggtacgggaggttcccaggatcgtgccgcccttggtaaggatgccggagaaatccttgtctgtcagcatgcggaaattaccgtagatcagtcctctgtagccatcgaggaagccatagatctcgacctcttccttactgttcgccagggtcttcaccacacctctcatggcagcatttaatgcctggcagtcaccaccgctcgtcaacattccgattctcttcatcgtaggatcctccgttttctatatttcattattttctcttgcgtttgctgtaactatgcaaaactgtcttcgttctgccaatacttatttctattttaatacatttattttcatctgaaaatagtttgttgtaatttccggcagatttctcccctatggcaaaacaaacctcagaagcaccgggcctctgaggttcgcttatcatcttatcatacgttatttgaatttaaactttcctttgatcatggtcacgtagacagctgcgccgccaccgccgaccactacggctccggctgctgccgctgccgccacgcggcctgcgttcgttcccttaccggaggtctccgttatctgctctgtgccggattcctgagagtcggaagtctgggcggtcatggaatctatccgctcctcctgcggtgcttctccactcgattcctgcgtgtcctgtgcctccccggagggctttgccgcatcttccttacggttttcgtccgcagcgggtgttgtcgggggcacgggaattacagaaggctttaccacaccgggtgtggcaggcgttgccgtggctgcgggaggtgttgccgcgcccgtggccttctggtccgtattggacgcctgactgctgtcatcgtcgtcatcatcgtcatcgtcgttactggcagcaggcttcttcggtgcgatctcataaccgcagatcgtacagatctccgcccgttctgtggtggccgcgccaccggatgcatgcttttccgtattgctggtgattccacagacaccacacttatgccagtgtccggtcatatcggacagatatccttctgcccagctatgatccgtcttcggaagaacgatctctgtcgctgttatgctcttgcttccgtccgcagatgcaaaatacagtccgcagacgtcgcaggtccagtattcgatgctgccctctgcctgacaggtgggttccacccggtcgtggcggttcagcgggccgtgaccggagttccatgtcttcgatacggcggggcttgcgttataatcatcagtttccgcatagcggatccgtgcagtcaccttctcgttgtgaccgactccggtggatttggtctgcccccagtccgttccatcaaagctgaattccacgtcagtgcgatctgtggtgatctgcgccgccagatcattgccgctgacggtaaaggtcatgtcaaaggcatccggatccggggtatcctcgcggtctgcttttgcggtgcgaaggatgtgcacaccaacatagaaattctcataattctgtgactgtaattcaaccgataatgtggcagtcttgccgatatcttccacagtattttctcccagggtaaatatcagctttccttccgaatattcaacctcggaatctgctgccaaaatgttctctgaatcctctctcgttataacagtcattactgtttttcccagatcttcgggcaaccccggtatttgcacagccctctcttccttggctgcccagctgtattgcagtttcagatcttcaaggttccaggctgatgccggttgaatcctcaatttcaccgatgcggtcaacgtctgatagtattccggatgttccggaacaaatgtcgccgtataggtctcgctgtcactgacataaggaatctcatctccgtcgatcttccagcttccgtcaataacattattccccagcttcgctgtcaatccgttcactgtaaggccactcagtttcgtgccataggttccgctggcaatgccatcaccctctgccgtaagtgctgtcggggcgatattcacagtcagatccttcgttgtctgctccgggaagaaggaagagtttgtcccggtgtaaacgagagtgaaagtggtctcgcccacggtctgcgccttgtaagttgcgatgccgttcttgaaatccgctgcgcttaccaccggggtatccccgatccggatctcgaagctgccgtccgtatcttccgcagagatgagctgttcgtctgtcacaaagtttaccagtgcctttgcgttaaaagtaatatcttgtccataggtgggagtgttggtatctgctctctcaaactgcagaccggtggtgtaatttacaccaactgcattattttccccaagcgaaggatagtaggctatgccattctctttgtcgttggctttcttcgtccagatggcctgatcaaagccattgtctttgagtcctttgaaaaagctggaagaggtcagttgttgagtagaacgtcccaattgatatttatcttctacgttacaaatatcgttattgaaatagcaattcgttacaccataatcttgactatttgttattccagcaagataggcatcattctcggcagtatcaatcgtagctatactaatgcaatgattaataatatctactacagctccactcctaccgcagattcctgccgcagaacttccctgcacgtctcctgcaaaaaagcactgggaaatcttagtatcttgtccggcattgccacagattccacctgctgtatacccttttaccgttccggtaaaggagcagccataaatttcgcccgcagacaaatttccacaaattcctcctgtttcactataactcgaaacaatgtctccgttggcagccaacaacagtattactttaccgcttttgccggatgagttgcctatttgtgcgaacaggccagaactataaacaccatcttcttttgtcatatccacatggcttatcgtatgtccgtctccactgaattttcctatgtatggaatttcaggatctccaatggagctgagttccactccgctcaaatcaatatcgttccccaggacatagtttacactccattttgtcgtatcctgtccgatggctgcgaattcctccgccgtggtgatcagggtataggtagcccagtcgtcaccattcgttgtaacatagttgtataccggtacggaagcagtcttcgtctctccgattgccgccacgctttgcaaattaatataagtccctgtggctgtaccgaatctacttcctgtacttgtagccactgcattgctggtatcgacactgccctctttccagtttgcagaatcgaagccctccggaagtgcaccgcaaagctgccctgccgttagtgctgttccagcgtcaaagcctccggtaattgcatccatattgtaatagcaatttgaaatatgccccgtactttcagaatcagtgctacctacaattccgccaaaagattctcctccactgactttccccagatttacacatgcagtaatagtcgcagacgtagtggtatcatcaaagatgccaaatattccaccacaggcactttgataagctttatttataatcattatctcaccggtattcaggcaattctcggcaataccacccatcccggcaataccaccaactctccctcgccctgttaccttactactattgtaacattgcgagactttaccaaccgaatatcctccaatcttaccgcaaataccgccaacatctgttttgccgtttattgtatttccaatactccgacagttctcaatatttatttcttctgcgtatcccacgatggccccaacaaagtttattccacaaataacagaatctttaaccgtaatattttttatggcactattaacattatgttttgtgcattctccaaacaagccgacacgatctaattcaccacttatctgcattcccgtcacagtatgattcctgccgtcaaagttccctcgaaaagaattactatggtttcctattggtgtccattcctgattattaagattaatattatttttcagtataatatattctccatcgtaccattttccgtcattcacactttttgcaaaatacgcaagttccgccgcagtattgatctgatagggatcattttccgtaccggtgcctacggcaaacccacttgcaatcgtaccgttccacacatctgtctccgctcttgcgctcaccggcacggcgatccacaccagtgccgccagggccagcagggccagtctcatcttcatgctccatgcttttgtacttttcttcataaccctcatgcctttctatatcctgcaaaatttcaaatatttcccaaccctttgcagatgtaaaatccaattttgtttttatactacccgtatcatttattataccgaaaaatcaatagtaacgtcaatattttccatacgattcgtctcatatttttataaaattttgtcaaacaagtgcgcccaccgcaaaatcgagcaggctggctcatcgtaagcacaaaaaaggagccaccggatctctccggtcactcctcgttgccttctctgaaaaatatatccagttttcccagacatttgatcaatgtcttcatttcttcctcgtccagatcccgtatgatggtgtggatcattttcctgtggaaatctctgtgatggaaaaaagctttcctccccttctctgtcagggtcaccagcactacacgtttatctctggtgctgcggttgcgggtgagatatccttttctctccagactgttcatattcgtggtcagggttcccacggtgacatgcagttccccggcaatcctggacatgctcttgggttcctcgatgccgatagcctccagaatgtgtatgtcattatttgtaatatccttgaattcgtctgttatgaccgcctttgcctctgcgtccatcacgttatggaacagattcaccagcaattcgttcagcatccggttgttgctttttcccatagttacctctacgatatctggaatttttctttcgtatgtccgcaatcctccgaagccgccttctctgacgcatatccgcagtcttcctgcgctccggatcattttcagtataccgtctaccaggtcatcacgcaagccccaatcgtaagcccggctccgaatcccgccagaacgatacgatcgccgcggtgcagctttccctgcctgttcagttcatccagaagcaccggaatggaggcagaggacatatttccgaccctttccagattggtggggaatttgtctctgtctgcatgcagtcttttcgccactgcatcaataatacgtgcgttggcctgatgcagtacgaacaggtcaatatccggcacagtaagtccggcatctgacagtgcttcctcgatgcactgtggcacccgtctgctggcgaaccggtacacttcctgtccgtccatctgaatataaggttctctgccatccgtcggctggttttggtccgtttttgccgctgaagtccttgcatatggggttgtcagttctcttgctccgcattgcaggactccgccaccggtgccgtcggagtgcagtgcccggcccagaatgcctgctgccggtatccgtttctcctccgccgtctcctgcatccctttctctgtctccggcaaagcgttactgtattccaccgcccgagactccgtcctgcattgctccacaactaccgccccggcaccgtctccgaacagaatacagctgccccggtccgtccagtccaccagcttggacagtacctcactgccgatgatcagggcatttttcgccaatcctgtcctcagataagcatctgcggtattcagtgcaaacaaaaatccggaacaggccgcattcacatcaaaagccaaagcattcaccgcgccgacagctgcctgtacctggcaggcacagcagggcagatactgctccggagaacaggttgccaccaggatcaggtcgatctcttccgctctttttcctgcctgttccaatgctttgcgggccgcttctgacgcaagtgtcacaaccgtttcgccaactgacacatgacgttccgcaataccggttctctcacggatccattcatccgaggtttccaccatctgctccaattctttatttgtaacgatccttcccggaagtgcacttccggttccagtgattcttatggtcctcacgccatttcctccatgatatccactgttctttctattttctgcgcccgccaggcattgctgccgcagaacagcagtccgttatccacatctcccattgccgcattgatcaatgctctggtgatgcaatacggtgctgtcttcggatcgcaggtcttaatgcaatgtctgcatccggtcataaaccgttccccggccgccaccttttccagaaaagcattctgtatggctctgccgggcattcccaccgggcttttcacaatgacaatatcttctttctgcgcccggagatactcctgcttgtacgcctccgccgcatcacattcctctgtggtcacgaaacgggttcccatctgtacccctgcagccccgaggtacaggcaatgctccagatccctccggtcataaataccgcctgctgcaatcagtggaatttccagttctgctgcctgccggatcattgccgtaagttctctctcatagttctccggtgtgtaagcatccagttcttcccgcttaaatcccagatgtcctcctgccaacggtccctctgccacgagaaagtccggctttctgtcgtattttttcatccagtatttcgtgacgaccgacagggcacgggtacttgacacgatcggagccagcattgtccggtggctgcgcccgggcattccgttttccgtctctgccacaactccgggcaactccagtggcagccccgcaccggagataatacagtcggtgcctgccagcactgctgccctgacataatcctcgtagtgctgtgttgccaccatgatgttgacaccgatgataccgccttttgcgatctgccttgctttttctatttcttttccgatagtacgcagattacaggcgatgggatctctgtcaaaatccggctcccggaaaccgatctgggcagtagaaataatgccgatcccaccggcggctgccactgctcccgccagaccggacaggctgattcccacacccatgcctccctggatcacgggaatatctgcatgtaattcccccaggatcatttttccgtgcttcatcccacatcacctctcattaccgctttaatacttgcggaacctttcataacgttcctctgcgatctgttcaccggtcatgccggtatatttttgcaggaattccttgatatgttccttgagatacccgccgatggcttccacggtactttgatctgccccgccgtattccggtacaatcctctcgatcactccgaggcgtttcaggtcctcggatgtaatattcatgacttcactggcttctctggcacggtcagcatccttccataatatagaagcaaaaccttcgggagacaggatcgagtatgtggcattttccatcatccatacctcattgcctaccgccgtagccaatgctccgccgctgccgccttctccaataaggatgcacaataccggtaccttcagggccgacatctccagcaggttccgggcaatagcctcgccctgtcctctctcctctgcctccacgccgcagaaggctcccggcgtattcacaaagctgataatgggccggttgaatttctccgcctgcttcatcaggcgcagtgccttacgatacccctccggcatgggcatgccgtaattgcgtctggcacactccgcaaaatccttgcccttcacatctgccaacactgtcaccggctgcccgtccaggaatgccaccgcacctaccagtgctttatcatccccataataacggtctccgtgagcctccactacataatcgaaaatgtagggaatatagtcggttgctgccggtctgtccactctccggacggtcttgaccttttcccatgccgttctggggagtgtcagtattgaccgttccttcacgatctccgtaggttcaaaatggaagtcaaaatttttcttaaaatccgcataattcccctcactgcaccgatgcgtcgtgatcaggaaatataaggtcttcttcagattctcccggcggacgataccgtccacaaaaccatgctcctgcaaaaattccgctgtctggaagccatcagggaggcgctgtcccagagtctgcttaataactctcggtcctgcgaagccgatcaaggctcccggttccgccatgatcacatctcccagcatggcaaaactggccgtcacaccacctgtggtgggatctgtcaaaatagtcgcatagagaagtcctgcttctccatgtcgtttgatcgctgcggaggtttttgccatctgcatcagtgacacgattccctcctgcattctcgcaccgccggaacagcagaacaaaaatacaggcagccgcaattctgtcgccttttcaatcgcctgggtgactttctcgccgaccacatgccccatactgcccatcataaatttggattcgcagatgccgatcacagccttttccccgtagatctcgcattcacctacggtcacagcttcttttacgccggatttttccctggcctccgacagcttttcctcatagccctcatatttcagtggattgctctcttctatctcctcgaaccagggctgaaagcttttccggtctgccaccatgcggatccggttgtgggtcttcacccggaaataataaccacactcatagcagacatatttatttttcgctgcccggtctctgtttatcattttcttacatttcgggcatttgatctctgtttctgtatctacacttcccatacctgcacctcttattctgcgtcactcttatctctctgtcccacccataagaaatcacttccgcagactatttttatttcaacgcaaaggtaagctctgccttcgctaccagttttccgtttaccgtggcgatcgcttccccgacacccaccggtcccttactgcggataatggtggtctccagctccaaggtgtctccggggcgcaccatctgcttgaattttgccttatcgatcccggcaaaataagcggtcttgccacgatgctccggcagagacagaattgctacagcccctgtctgtgccagtgcttccatgatcaacacgcccggcatcaccggattccccggaaaatgcccggcaaaatacggttcgttaaaggtcacatttttgcgtcccactgcccgcacaccgggctccagctcctcgatagtatcgatcagcagaaagggatgtctgtggggcagaatctccatgatttcctgtgtattataaactgacattgttcctccgttccgcgaatgctgtcgtatcaactacttcctcgcattgtgcaatcgtcctcgttgatactctgccttctatcctgtgtcttgaacatctgctgcggttattctgtgtacttcttcaacagcagactcgcattatgtccgccgaagcccaacgaattggtcaatgcataaggcacctcttctttgtagctgtcccggcagtaattcaggtcaagttcctcctccgtctcacgcagtcccacggtgcggtggatatagccttcctgaatttcttttacgcaggtgacaaactccactgctcctgccgctcccaggagatgtcccaccatggatttggtggaattgatcttcaggtcatacgcatgttctccaaatgcgagcttgatagctctggtctcgaacaggtcattatgatgggtgctggttccatgggcattgatataggtaagctcttccggttccacaccaccgtcttttaaggcattcagcatggcggtggctgctccgctgccatcctccgcaggggatgtaatatgataagcatccgaagaacagccgtagccggtcagttccgcatagatcttcgccccgcgcctctttgcatgctccagctcttccagtaccacgatagcggaaccctctcccatgacgaagccgtttctctccttgtcaaaaggaatggatgcccgttccggatcctcactaaatgacagcgctgtcagtgctgaaaatccggcaattccgatgggggtaatggagctttccgttcctcccgctatcattacatccgcatcaccgtactggatcgtacggtatgcttctccgatggaatgtgtaccggttgcgcaggcagtaaccacattcaggctcttgcccttcagcccataggcaatgctgacattgcctgctgccatattggagatcatcagaggcaccagcatggggcctaccctgccggggcctttttccttcaggcggtcatattcccgctccatggcctgtaaacttccgatgccgcttcccacactgcagcccaccatataaggatcttcctgttccatagtaagacccgcatccgtgatcgcctgtccggcagccgctacagcgaactggcagaactgctccattctgcgggcggattttttgtccatatattgtgcgggatcaaaatccttcacttccgccgccaacttacaacggtaatccgcagtatcaaaataagtgataggaccgaatccggtcttgccctctttgataccattccagaattcctctacgctgtttccaatcggagtgatagctcccatgcctgttactacaactcttctatttttacccatacgtgatatactccctcgcgtcctgacttattttctatcctgctgtactgttagcggacatattttctattctgctttactgttgccggaggtattttttacattgccataccgccgtccacgcacagcacctggccggtaatatagtccgaggcatctcctgccaggaacagaaccgcctgtgcgacatcctccggtcttcccattttcttaagcgggatctgtccaaccgcattatcctgtaccgcctccggaagcttatctgtcatatctgtccggataaatccgggtgccacggcattcacacagacattcctggatgccagttctctcgctacacttttcgtcagaccgatcagtcccgctttggaggcagaataattagcctgccctgcattcccgacgatgccactgacagaagagatattgatgattttcccatatctctgcttcataaaggtcttcgtcagatgccggatcatgtgaaatgcgcctttcaggttcgtatccaggactgcattgaattcttcttccgtcatccgcacgatcagattgtcccgtgtgatcccggcgttattgacaaggatgtcaactctgccgtatttctctgttactgcctttacaaaggcttcactctctgcaaaatctgcaacattgcatttcacagcctccgccatgccgccttggcttcggatgtccgccgccaccgcttccgctgcttctgcagagccgttataattaatgatcaccgtggctccttctgctgccagtgcctgtgccacagcttttccgatgccccgtgatgcccctgtgacaatagcaacttgtcctgtcagactttttcctgtcaacatgccagttcctccatcacccggtccagatcctccggtttctcgatattgtatactttgacatttctgtcaattttccgtacgaagccgccgagtgtcttccccgggccgatctctatgaaagtgtccacgccatctgcgatcatccgctctacgctctgggtgaaatgaacgggactggatacctgttgtttcagcagttccgcaacctgtgacgcatctgtcacataatccgctgttacgttggacacgtaaggaatccaaggggttgacagcttgacgcttttcaattcttctgccagctgttctcccgcagttttcagcaaagctgaatggaatggtccgctgacctttaagggtacacagcgttttgcacctgcttctttcagcgcttccgatgctgctgctactgcatctgcctctccggtgatcacgatctgccccgggcagttataatttgccaccgagacgactttgccggtttcttttgctgtctgtccgcagatttttgccacggtatctccgtccagccctaatattgctgccatggctccgccttccggataggcctcctgcatatagataccacgcatccggatgatccggaacagatccggcagctccatcacaccagcggcagccagcgccccatattctcccaggcttaagcctgctgccatctccgctttcagtccttttgcctccaatactttcagaattgccacttccatggtcagcatggcgatctgtgtgtattccgtaatgttgatataaggattttcttcaaaggtcagctgttccatggagtacggatgtccgctttccgcctgtacttcccgcttatcctgccaatacagattctggagcaccttgtctgccagcttccataccgcctgtgcttccgggtaagtatcatagaactccttgcccattcctatgtactgggagccctgtcccgggaataaatatgcgatcctgctcattttgtcttctcctaattactatgtgatgctattgttctcctcggttacagcacatttttttataatgcgccgttttccatataactatgccgcctgtcgctgttcgaaatctgttgtcagcggttacctgtcgctatattttatttatgctgtccttgtgccgctatgcactcctgcgcctgctgtactgtttcttcaataatctcacggcaggtctgttctctgcggatcaagcctgcaatctgtcccgccatcagtgttccgtttacggtatctccgtcctgcactgccttcctgagagatcccagtgtcagcttttccagttccatgaaatcggcattctctttttccagcttcagatactccctggtcatctgattacgtaaagaacgcaccggatgtccggtagacattcccgtcactacagaatcaatatcctttgccttgatgatctgattcttataattttcatggacgatggattcctttgatgcgacgaaccgggtgcccatctggataccttccgctcccagcataaaagccgccgccattcctctgccatcggcgatacctccagctgcgatcaccgggatagataccgcatccactacctgcggaaccagtgccatggtcgtggtggaaccgatatgtccaccgctttccatgccttccgccaccacagcgtccgctccggcacgctccatcatcttcgccatagccacactggctaccaccggaatgactttcactccggcattcttccacagttccatgaattttcccgggtttccagcaccagtcgttaccgcttttactccttcttccacgacaatcttcgctacatcctccgcattgggatttagcagcatgatattcacgccgaagggtttgtcagtcagttctttgcatttacggatttcctcccggacaacctcaggcggagcggaagcggcaccgatgatacctaagcctccggcatttgataccgctgccgccagcttatgttctgccacccaggccataccgccctggaaaacgggatattctatttgtagaagttccgtgatctttgttttcattgtctttctgatccttctcgtcattctgcgttatattacatattctgatgataccagggtcaaaaggtctaagcccacatgagcttgctcataagtgggtgaaagaccttaggacccgccccgatatgagcataaaagtgggatgataatcccacgatatgcgaatattgggtagggtgctatgtgccagtggcacatgtctagcacggaccgaagcggagcggagacatgggagtgcgtagcacgaagcaatccgtaggtatcaaaatcgagggcttttgcctgcggactcttgcattcaggcagatatgccgttcttacgcatgctcctgaatatatctgataacatcacctactgttgccatattttccaattcctcggaaggaatggatacaccatattcctcttcaaacgccattaccagttcaaacagatccagggagtctacttccagatcctccttgaaacgggttgcctctgtgatttctacattctcctgatttaactgttctctgatgatggctgctactttttctaacatgtttttgctctccttatgcatttcattattgtgtttctgataccttgctttactactttgtcgtctccggcgtgtttgcctttcatttcaaattgttttgactatcaaagtatttatctgcaatatactacgcggatgttgttctgtcaacatctttttttattattaccgcttacaaacttattatcatcacgtaagcagtaataatctcattgcaaaagatccttttcccggaaaaatactgctacaaaagcgtaatttccttgccaggcggtaaaatccggtggtttccatcggaaaatttgcaaaaactaccgcctgcaaaaataatttttcaaatcaggcggtaaatgccatcgcaaacaatagaaactactaggttttttcgtttctccccttgccaaacggttatttttcagataaaataatctacgttgtaatcttttggagacgtatcgaagtggtcataacggggcgcactcgaaatgcgttagccctccggggcacgtgggttcaaatcccaccgtctccgcacataaaaagccggtaatctgtcaaaacagactatcggcttttagttttagaaaaatgtgcaaaaaacgtgtttattttccagaaaaatgtgttatgcctcccgcagaatctgcatgatcgtatcataatgctccggatcatgcgggaaggtgcagcccgagcaatccttgatccgtctgccatttttctcgaaatacctgggattcccggggcagtgctccaagcggtacatggggcagtagcagaacaggcagttgaagtctgcaagtcccttgtggcaggggaaatatttacaatctttattctcaaaaaaacgataggaattttccatttgcaacactcacatccttccataacctgcaaagtttgcgcattggcgcaaatttgcgtgcgaaacatagaacttcttcgcgaaagagcctttgctctgagtgattagaagttcttttcacactttacactacacttcttccgccatacacattccatgggcaataccctgctccttcagctgttcctccagctggttcaacgcatcatcttcatcttctgcaaacaccatcgcctgatagacttcctccggtccttccggtgccagtgctgtcacctcatacatctgcatggcaattacctctttcttcctcaaaatacgcattcacccttctctttattttatacccgtttccccgtttttttgcaagcgaaaagcgccactccggggaagagtgccgcttttcaggagagatttatgtattgaatgttgctggcgaaatattaacccttgacgcttcccattgccacgccctggacaatgtacttggaaaggaacaggtatacgatgataacagggaagatagagaatgcaatcgttacatacacctgacccatatcaaacttcaggaagtctgcggaacgcagctgagcgatcaggataggtaatgtcttcatcttgtcatcatgcagaaccagtgccggtgtgaagtagttattccagttcgctacgaaagtgaagatcgcctgcactgcgattgccggcttcatcagcggcaatacgatggaattaaatgtacggaactcaccggaaccatcgattctggctgcctctaccagagacaggggcaatgcactttccatgtactgcttcatatagaagaaagtagcaggtgctgcgattgccgggatgatcagggggataaagttatcctccagcttcatatcagctaccaactggataaatccgagtgcggtaacctgggtaggaatggtcatgattgccaggataaaggtaaacatgaacttctttaacttaaaatcatatacatggatcgcatatgcggtcatggtagagaagtaggtacacagcacagcactgcaggttgctactacaaggctgttgatcatacctctgactatcggcagggttcctgccatgacacccttccagttctggatcagatgtgtgctgggcagcagggtaaatccctgtgtcagctcgcctttggatctggttgcatttacaaacagtatatagaaccagaacaggcagagaaaactcataataaccagtacgatatatgcaagtgctcttctggcatgaatgcccagacctttttttgtctcgtttgtttctacgctcaacatttctgccacctcctacttatcctgtttgttgttcgagaacttaaatacgatcaagctcaggatacctgtgataatgaacaacattacagacaacgcaccactcattccgtagttcttactgtacaaatggttgttcaggtacatgatcagggtcatgctggatctcataggatcgcccttaccgttggtcagaatctgaggtacatcgaacatctgcagaccaccgatcagggatgtgatcattacgtagatcagaatcggcttcaacaaaggtaatgtaatcttgaagaatacctgggtagaggttgctccgtctacctcggctgcctcgaagagggaagtatcgatacccatcatacctgccatcaggaggatcgttgtattaccaaaccacatcaggaagttcatcaatgctaccagacctctggtactccatacgtttgtaaggaactgatatggcccttttaagattccgatctgcatcagcatttcattgataggaccgccatcagagaacagcgtgaagaacaacattgcaaatgcggaagccatgatcaggttcggcagatagataactgtcttgaagaatctctgtccctttaatctaaggctgggatccgagaaccatgcacccagaagcagagatatgatgatctgcggtacaaatcccagtacccacatgatcaatgtattcttggtgtacatccacaggtccggattggacaacagctttgcatagttaccaaatccgatgaaattcggtccgatctgtgtcagtccggaacggtaattttcaaaaaaactgtaataaaatgtcctgaacaacgggatcaactggaataatacatacactactacaaaggggatcaggaaaatatacccccacttattatagcgtaccacctttccgcgttttacctttgccataatgattcctcccttttgccgtcatgctctcttagcgactttacgttttttcgtgccatcttttttccgatcaggctcgcagcagctctcttctttttgttcttaattatcttcttctgaaaaaagcttctgccaaccgggaattttgagagaaaaaccgtgcctacctgaccagccaggcaggcacggttctcaattccttattgtttcgctattcgcttatcatttcggattagtgagtaagctcaggatacttctcttctacagccttgtagaacagattcagtgcatcatccagagaagccttgccatcgaagtagttcttcatagcatgctggaactcttcgttacatccctgatcgtatgcagacaggttgctcagatcgatcttctcagcgcctgcgcagaacatagccagagggttctgtccgcccaataccttgctctgataagaggtatctgctgccatagcttccatagcgggtttgttgtttacgaaatcatcatcagctacaacgatctctttcatgatgtcttcatcagtggtcatcttcaggatgatatccttaaccagagaagcgttgtcggttccggtagcaccgcagatccaagtaccgccccagaagaagccctgaggtccttcagtagcgccccagccaccctgatttgcgatagatccatcggtatcagctgccatggagaagttgatcagccaagcgggtccaaagtagcagaatactttgccatcgggatagaagcctttgctccagtcatcagaccacaggtcaaaggtaccggtctccttagcgtcaaccatcttcttggagtcatcaacccacttcatcaggttgtcatcgattacgatcttgccatcctgtacccatttgctggatacgttgttggagtatacacgataagtatcgtttacggaagataccatgttgtaaccggctgctttcatcttctcagcggttgcggtgaaggtatcccaatcagatacagacttctgaacctctgcaggatcatcggttcccagaacagccttagcagcctcacggttgtaaatcagaacgccggggcagccctgccatgaaacacccttcagattgccgttggagtcggtaacaacatccttggtgtactgatactggttagccagatctgcatcggtgatgcccagatccttaacaggcattgtgtagtcggtatcaacatatttcaatgcgtagtcagcctcaatcaggaacaggtcgatcttgtcatcagctgctgcatcagcctgctttaacagtgtttcatccagattgttctgataagcgttgtcatcagaaggagtgatgttccactttacagtgatgtcaccgatcttaccggtggttccgtctacttcttcatatccgggataatgatctgtcagacggctcttgaactcttcgttccagcagtagatgttgaagactttgccttcttctgctgctgcaggctctgctgcctcggtggatgcaggcgcctcggtcttagcttcggtggaagctgcgggtgccgcatcggtggatgctgcaggagcttcattgctgctgccacaacctaccagcatgctggcaagcatagcagttgtaagtaaagcactaagtacttttttcttcatgtttgtttcctcccattttttgttgaatgtttgttgtaagtgtttgttgcatttatattcatatgtcggcggttgcgtcgcttccatataaatgcctgattaattgtctgtcggaattctggccaccgacttgccttcagcaactttcccgggtacgatgacctgttctatgatggtggtcttgggtctctcaatgagactgatcagttctctggctgccaggcagccgatctgttctgtgtcctgttggactgtggtcagtctgggctccaactgccttgctgcctgtatgccatcatagcctgctaccgagatatcttcagggatctgtaatcctctctgtctgatagcgttgatgcctccgaaagaagcaaagtcatccggatagatgatgcatgtcggtggattcgggagatccagcagttcattggtcacacgataggttgttgttgtgtctctgtaagctgcttctctgatatactcgtccggaatctccagtcccagacgttccgccgtccggtagaagctggacaaccgtcccgaggtaaccgctgacattgctccgtgaatataagcaattttcctatgtcctctactatatatgtactccagcagttctttcattcccgcaacattgtccgacatgattgcgatacgattgttgaacaggtagtcaatggtgactaccgggatggaactctgtactaattcgatgacttcgggatctccgaaatcaatacaggcgagcaccactccgtcaaagcctctgtacctactgtgttccaggtaggacatccgatccggccggttcttgcagctattaatgaatgtaatgtcgtaaccgctcttctctgccgtcctcttgaaactgtccagcacactggaaaagtaatcgtgggtaagaccgcttctggcttcatctgcaaagaggactccgatgccgtaggtcctgttcgtcttcaaagctcttgcggaaaggttcggggaatatcccatttcctttgcgacccgtctgatatttgcttttgtttcttctccaatgtccttgtggtcgttcagtgccttgctgacagttgcaacggagactccacaaatcttggaaatgtctttcagtgatgccatatctttctcctgttccatgtcttcgtcattccgtccgacctgttttgtaacttaatcgttttcgtagttttaatatataacacctttgagcattttgcaatacttttttgcagtttttttcaaaaaagtatccactttgtctataattaacaatttcagataggctgttttgtacatttggcttgtacatagattgtgtttcttctatataaaggcaaagtgtgcgataacgtttgctattattttgtttcgtaaaaccggtgtttcgaaggttctttcattttgtatcttctgcccatgtttccccactgtttttgtatacattgcgcattttacgggctttttcaagattcgtattgcatttttccctttgcttctgtataatacaaatcagaaatccggagcacttaatcgtttacttaacattaagcactccgcaacgaaaaaacaaacactcaacatacaacaacatgaaagaaggagattttcttatgaagtatggtcattttgatgatgtgcatcaggaatatgtcatcaccactcccaagactccgcttccctggatcaactacctgggctgcaatgagtttttcagtctgatatccaacacctgcggcggatatactttctataaagatgcaaagctgctgcgtctgacccgttatcgttataa

SEQ ID NO: 1116 - DNA, 14789 bp, unidentified
  source 1..14789: mol_type = unassigned DNA
atgacaatggatgaattacagccgggacagagtgcttatatcacggcggtcggcggagaaggtgccttgcggcatcatcttctggatatgggattgacgccgggaacggaagtcactctacagaagattgcaccgatgggtgacccggtacagatgaaggtgcgcggatatgagcttacgctgcgcttgagtgaggcacagaaaatagatgtggatcatgtgcatgaaaaggaagcggaagcgccaaaacagactgtgcgttatgagtcgattgaacatccgggagttggtgagttaggacagacggatcccactcatgtacatgacgagaagacggcagttcccaagggcggtaagctgacatttgcgcttgccggcaatcagaactgtggcaagacgacactgtttaaccagctgactggagccaatcagcatgtcgggaatttccccggtgtgacggttgaccggaaggatggtacgatccggaatcatccggaggcaacagtgacagatctgcctggtatatattcgctttccccgtattcaagcgaggagattgtgacgcgggaattcctgattgaaggtaagccaagcggcattatcaatattgtggatgcgtcgaacctagaacggaatctgtgtctgacgatgcagctcatggagcttggaatcccgatggtgcttgcactgaatatgatggatgaggtgcgggcgaacggcggtacaatccgtgtaaatgaactcgagcagatacttggaattccagtggtgccaatttcagctgcgaaaaatgaaggtatcgatgaactggtaagccatgccatgcatgtggcaagataccatgaaccgccgggaagaatcgatttctgtccggacagtaaggatgacaaagatccggttggagcggtgcatcgctgtatccatgcggttgcgcatatgattgaaaatgatgcgaaggaagccgatcttcctgtgcggtttgctgcaacaaagctgatcgagaaggatacaccgatcgaggatgcactgcagcttgcagaagataagaaggaagcatttgagcagatcgtgtcagtcatggagaaggaaaccgggcttgaccgggaagcggcaatcgccgatatgcggtttcagtttatcgggagattgtgcgagaagacggttgtgcgtccacatgagagtaaagaacaccggagaagcgtaaagatagataagcttctgacaggaaaatatacagcgattccgtgcttcatcgggattatggcgattgtttttgccatgaccttcagcctgcttggtgcgtggctgtccgatgtgatggcgcttggcgtcgatgcggtcattggatggatcgacaagggacttatcgctgcacagattaatccggtggtacgttctcttgtggtggatggtatctgtcagggtgtcggaagtgtcatcagttttcttccaacgatcgtgatcctgtttttcttcctgtcgattctggaggatacgggctatatggcgcgggttgcatttgtcatggataaaccgcttcgtaagattggattatcgggcagaagcttcgtgccgatgctgattggatttggatgttccgtgcctgcaattatggcgacacggacactctcgagtgaacgtgaccggaagatgacgatcctgctgacaccgtttatgagctgtagtgcgaagctgccaatctatacacttatgatcagtgcatttgtgcaacggcagtatcgtgtatttgcgatggtcggactttatctgatcggaatcgtgtgtgcagtgatctacgcactgattctgaagatgacgaaattcaagggtgagccggttcctttcgtgatggaattgccgaactaccggctgccgtctgcaaaaagcgtgctgcacctgatatgggagaaggcaaagggatttatccagaaagcatttacgatcatcttccttgcctcgattatcatctggttcctgcagaccttcgatctgcggttcaatgtggctgcatctgcagaccagagtatgcttgccttaatcggaagcctgattgctccaatcttcaagccgcttggattcggtgactggagagtatccacggcgctgatcacaggatttactgcaaaagagagcgtggtatcaacgcttacggttctgctcggtggtgatgtgacgagcgtggcaacgttatttactccgtttacggcaatggtattcctgatctttacgctgctttatacaccatgtgtggctgcgattgctactgtgaagcgggaaatgggcggcacaaaagcggcagtgatcacggttattgcgcagtgtctcatcgcatgggttgttgcattcttagtccatgcggttggattggcatttggcattgcgtgattcgtccgggcatttgtacatacaaagcggaaatgcttccatgtggaaaggcactgttaaccggctgggaaattcataattgataaataatatcaaaaaaatgcttgacattcattttcgataggactagtatgtcggtaaacaaagagcaaatgctgagaacagaacaaggttttcgaaaggaaatacttcagagagctgtcggttggtgtgagacagtgtaggatttcgggaattatcctctgcgagcagtgcactgaattcctagaaggacattaggtgtcaccggttttctaccgttacatagaagcttatttcacagatgacatgttgagatgatgcaaaggttgcaaatatatcgatatgcggtctgtaagatgagaatgagtggtcgcatatgcggcaaataaagtggtaacgcggaagtttaaaccttcgtctttatgtaagacggaggttttattttttgtatgccgatgagatttttcgtctggctgcaggatgtatttactctttgcaaatattcagaagggagccgccgcgtggcgggtgaggaagtatgaatggtttagtaattgttttaatcggaattgtagtgttgttcgcaggctatcttttctatggcagatggcttgcaaagaaatggggacttgatcctaaggctgaaactccggcagtgaagtacgaggatggagaagactatgttccatcatccaaattcacggtattttcacatcagttttcatccatcgcaggtgcaggtcctgtaaccggaccaatccttgcatctgtattcggctgggtgccggtattgctctggctattgatcggtggattgttctttggggccgtacaggatttcggagccttgtatgcatccgtgaagaacgaaggaaaatcgatgggtatgatcatcgagaagtatatcggtaaggtcggaagaaagctcttcatgctgttttgctggttgttcacattgctcgtcatcgcagcatttacggatatggtagccggaacctttgttggtaagggtgttgcggatatggcgaaggagacaagctatgcaaatgcatccgcagcttctatttctatgttgtttatcgtagcagcaatcgtatttggtgtaatccagaagcatgtaaagaatatgaacgaaggcgtcagagcagtcattgcaatcgcgcttttggtaggtatgtttgcacttggtatgcaccttccttggtatgctacaaagactgcatggatctacatcgttatggcatatctgtttcttgcatcggttatgccaatgtggttactgatgcagccacgtgactatatgacaacattcatgctgcttggcatgatcatcggtgcggttgtcggtgttgtcgtagcgcatccaacgatgcagcttaatgcgtataacggatttaatgtcggtgggaattatctgttcccaacattgtttgtaacaattgcctgtggtgcggtttccggattccacagtctggtatcttccggcacatcatcgaagacgatccgcaacgagaaggatatgccgatggttggttatggcgccatgattgtagagtcattgcttggtatcatcgcattggttgttgtcggtgctgttgcagtcaatggtacgaaaccggatggaactccatttgcaatcttctccagtggtgttgcgggattccttgagaagcttggccttccggttcagcttgcaactgtatttatgacaatgtgtgtatctgcacttgcactgacatcgcttgattcggttgcgcgtatcggacgtatgtctttccaggagctgttcctcggcgatacaaccgatacatcaaagatgcctgtatggcagaaaattttgactaacaaatatttcgcaactgtggtaacattattctttggatatttactgacacttggtggatatactaatgtatggcctttgtttggttctgcaaaccagctgcttgcagcacttgtattgattgcgcttgcagtattcttgaagacaaccggaagaaccggctggacactgtacgcaccaatgttcatcatgcttgccgtaacatttactgcattggtacagaagacaatcgcacttgtaaagaacatcgccggcggaaatgcaacaatgctggtcgacggactgcagtttatcgtcgcaatcctgctgatggtacttggtgtgctggttgcatttagttgtctgaagaagctgttcacgaagaaagcagaggctgaaaattaggagaattgcgaattaagaaagtgtaagcatatatttcaatatgattcatttcatatacaatgtattgaaactaagaagttctaaatgttcttggtttatatttagaaattatacgccaccgccgccgattcgacatccatgtctcagcggcggcttgtttgaacatcgtgttcaaacatggctgcgactgattacagaacattaagaacttctaagattcaaacatatcgtatattaaaatgaatcaatattgaaatatatgatttacattttctttcttgtttcgcaatgacaaatttttaactttggaaggagatacaggatgtgtacagcagcgacgtataagacgaagaatttttattttggacggacgctcgattatgagttttcgtatggcgatgaggtgacagtgacgccgagaaattatagtttcaagtttcggcatatgggcgagagaaagtcacactacgcgatgatcggtatggcgtatgtggcagatgattacccgctctactatgatgccgtaaatgagaaggggcttggtatggcaggcttgaattttgttgggaatgcgaagtatcaggatgtgcagacagggcgtgagaatgtggcacagtttgagtttatcccatggattttaagtcagtgtgcaacggtgctcgaagcacgcaaagcgttagaaaagatgaatctggttggaacgccgtatagtgagaagctgccatgtgcatcgttgcattggattattgcagataaggatgatgcaattgtggtagaatgtgtggaggatggcttgcatgtctatgacaatccggtaggagtgctgaccaacaatccgccatttccggtgcagatgttcatgctgaacaattacatgcatgtatcaccaagccagccggaaaatcattttgccaaggagcttccgcttgccacatatagccgtggcatgggtggactgggacttccgggtgacctttcgtcagcgtcccggtttgcaaaggtcgcatttacaaagctgcatgcaatctccggagagtcagaggcggagagcgtgagccagttctttcatatcttaggttcggtagagcagcagcgaggctgttgtgaggtggagccgggaaaatatgagattacgatctatacgtcctgtgtcaatgcggacaagggaatttattattatacaacctatgagaatcatcagattcaggcggtggatatgcaccgggagaatctggatggagatacacttcgacggtatccgctgatcaatgaggagcagattcatgtggtgaattagtagtcaatagtcttggttatagaaatgatctaatttttgtggaagttagagttttaggcagtcgatgagagtcggctgtctttttatgttagtttgagtggtaaattgggggaaaagttgtgaaaccggggaaatcccccaaccggaagctactgagaagcaagcaggttgggggaaaagttggaaaatcgggaaaatcccccaaccggaagctactgacaagcaagcgggatgggggaaaagttgtgaaatcggggaaatccccaaaccggaagcagcggagaagcaagcaggttgggggaaaagttgtgaaatcgggaaaatcccccaaccggaagctgccgggaagcaagcgggttgggggaaaagttggaaaatcgggaaaatcccccaaccggaagctactgagaaggaagcaggttgggggaaaagttgtgaaaccgggaaaatccctcaaccggaagctgccgggaagcaagcgggttgggggaaaagttgtgaaatcgggaaaatcccccaaattaaaaaaagggttgacagcagacagtttatacgctaacataacggtgttatgcgaggagccgcccacaggcgaagcctgtatcaggatggaacgaaaaggagcaagaaaagtggaaaaggaaacaagggagttgctgttggcgagtgccaagcaggaattcttggaaaaaggatatcagggagcctcgcttcgatcaatctgtaagaatgccggggtgacaaccggtgcgttgtatttcttctttcaggataaggaagatttgtttgcggcaattgtggagccggttttggagaagctaaaacatatgctgcaacagcatatgcgtcaggaactcatggaactgcaacagcttccggatgcaagggaagataacatgcaggatgatatgtttgcaagtacgcagataatccatcttctatatgccaactacgatatgtttatcctgcttctgacgaagagccagggctcgcggtttgaaacatgtatcgatcagtttgttgagatactggaacagggatatcgcgtatttgcggatgaacaggcaaagcagatgggggtagatccgccggatgcctatacgatccattgggtctctcatgtacagatcaatgcatttacccatttgctgctgcatgagagggatgagcagaaagcgctacagcacatggaacacgtcctgccgtatctggttggcggctggtacgcaatgttccaaaccaaataaagtaaatgagctatgccatgcatagctttttataagcctggaacataacagtgttatgcaagggcaagataattcaaatacatacaaggattatcgaaataggcgaatctgtcgttggaagcggatgattatgtagatgaagcagtttctatctaccaattcgtgcgcagaccattggaacacgccagcacttaacgagctgcaccgaaagcatgtaggtgcagagagtttagtgcctgttgcgtgtggaagtgagcgagagcgtgtctgcgcagaattgagtaggaggaactgcttcgaaaaaaggaggacaaagaagatgtatgtagaggtatcagatgtaaagaaaagctacggagagggtggcagctatatgcaggtgttgaagggcgtgtcggtaggcattgaaaaaggaaagatgtgtgtgattcagggaacgagtggttccggtaaatccacattgctaaactgtatcggtggactggatgtggtagattccggttcgattcaggtcgacggacaggagatggtaggacttaagatggatgcgctgtctgattatcgtagagattatctcggattcatcttccagttttacaatctggttccgaaccttaccgtgcgcgagaatattcaggtatgcgaatatctgacggatcagccgttagatatggatgagcttctggctgtgcttggactgaccgagcatcagaacaaattcccttcccagttgtccggtggacagcaacagcgttgtgcgattgcccgtgcactcatcaagaatccgaagcttctgctctgcgatgagccaaccggagcgctggattcgagaacttcacgggatatcctcattttgttagagaagatcaatgcgcagtatggcacaatgatgatcatcgtcacacacaacaatgcaatcaaggatatggttgatcaggtgatcgtcctgaaggacggacagatcaagaaaaattataacaatgaaacgaaggtgccggcagcagaattggaggatttgtaagatgcagaaagtattacgcaaacgaattttcagagatttcaaagagaatctgccgcgctatctggcactcgcatttttgctgattctcagcatgtatatggttgtgagtattgttggagcagcagagacagttatgcgtggcacaacaaccgaggcggagaagcagaacgtcgaagatggtcagttttccctctttgttccgatgaagcagagtgagtgggacgcattgacggataagggaattacattggagaaaatgtttttcttagattatgatgtcgatggggataagacacttcgtgtgttcaagaatcgtaccaaaatcgacacgattgcgattcatgcgggcaagctcgctcaggcagacgatgagcttgtgcttgagcggcaatatgcggagaaaaacgatatacacgtaggagatacaattgttcttggtgaccgtacatataaagtaagcggtatcggcacggtgccggattacgacagtccatcgaaatcactcggcgacacagtctgtgacagtctgaacttcggtctggcatttgtgacagatgaggcgtacacgatacttcagaaggaaggcaagagtgagaagtccgaggaatattattatgcatacaagttaaatgatgcgatgaccgatgacgaattaaaggcagagttaaagcagctttccttctcctccgacgatgtggatgatgcgtattttcaggagtattgggaccggacgctcggcagggaagaggaatttcgtgatggaattaacgagcttgccgatggggcaaaggagcttgcggatggattgtcagagctgacagacaataatcacgatctccaaaaagcatccgaccagatatttgcagcctatctcgaacaggcaaacagtaagctctctgcctacggagttgagattttgaccgcagataatttcgaggaagtattagataagcagattcggtccacaaacaatgcaatgctgcagcttgggcttgtgaatgcgaagagcgaattgcagaagctgaaagcattttcggatggtatctatgaatatacagatggtactgcggacgcagctgacggtgcagctgatgtacaagatggcgtgcaggaattaaaggatgagacagcggatatgctcgatgagatattcaatgctgatgcgaataatctgctgtccttcgtaactgcagaggacaatgtgcgtatccatgcagccagtgatgatgtggagatgaacaatacaatcggtatgattgctggcgttttgctcctggtgctgattgcttatgtgctttctgtattcgtggtacattccatcgatcaggagagcgctgtgatcggagccctctatgcactcggtgtagagcgaaaggatctgatgaggcattacatcctgcttccgaccttgatttccctgatcggaggtgcaattggaacagcactcgcttacacaaagattggcgtgcggtaccagatgcaggatacatattattattattccctgccggatatagcggtacagatacggccatatacaatcgtatatggtgttgcaattccgccaatcatatgtctggtcgtgacaagtcttgttatccgcaagcgcctgtcccgtccagtattgacattgcttaaaaatgagcagaaggctgcaaagggcaaggatgtgaagcttggcaacatgaagtttatgaaactgttccgtatccgccagatcctgcgtgagagacggactgcacttaccgttgtattcggtatgtttgtcagtatcctgctgctcgttatgtcaatggaaatctatgtatactgtcgtgctgtacaggatgattatgtcgcagatacaaaatttgaatatatgtatacctataaatatccgggcgaggaagtgccggatggtggctatgaagcttatgccaagacgttgaagaaggaaatctatggatataacttcgatgtaacggtgcttggcatcaaggagaacaatccgttctttgatgtgacactttccgattccgcagacaaggtaacaatcagctcatccatttcttacaaatatggattgaaaaaaggggatgtgatcaccctgaaggatgaggaaaatggaaaaatctacgcatttgagatcgaggcagtgacacagtatgcgccaagcttcatggtgttccttccatatgataaggcacttgacttgttcggtgagcaggatgattattataatgtcgtatttgccgatcatgatctgggtgtggaaagtggacgtctgtattcgacgatgacacgtgacgatgtgaagaaagcagccggaatcttctctgaccagatgcgttcgatgattattacgatcggcgcggtatctgccctgatctttgcgattgtcctgtatctgatgatgaaggttatgatcgatcgttcttcattcagcattgcgttgatcaagatcttcggttaccggaataaggaagtcaagaagatgtatttagatggaaacttctatatcgttttgatcggtgcacttgtttcagttccgcttgcgaaggtactgcttgatgcggtgtatgagccgcagttcgtaccgaatatcgcttgtggtgtcgacaagtccttcccagcatggctgtatctggcgatgttcgcaggtgtgctcgtattgtactttatcatcaaccatctgctcgtacgaagaatcaagcagatgctgccggctgaagtgcttaaaaatcgcgagtaaaatgagaaaaaaacgcatgtatttccattgagaagcatgcgtttttttggtacaatatacatatctgaattatgatacgaaaggggattatgacatgggatttttagaaggtaaagtagcaattatcacaggtggcggacgcgcggtattaagcgacggaagctgcggttcaatcggatatggaatcgcaactgcctatgcgaaggaaggcgcgaaccttgtcctgaccggacggaacgtacagaagctagacgatgcaaaagaagaaatcgaacgcaaatacggcgtgaaggtgcttccggtacaggcagatgtaagcgccggctctgacaatgaggcagtcgtggcaaatgttgtaaagcagacgatcgatacatttggaagaattgatgtactgatcaacaacgcgcaggcttctgcttccggtgtgacgatcgccgatcatacaaccgcacagtttgaccttgcgatttattccggattgtatgcagcattttattatatgaaagcatgctatccatatctgaaggagacgaagggctccgtgattaattttgcatccggtgcaggcttgttcggaaatttcggacagtgcgcttacgctgcagcgaaggaaggcatccgtggactgacaagagtcgcagcaaccgagtgggctgccgatggcatcaatgcgaacgtcgtatgtccgcttgcatggaccgcacagcttgagaacttcgagaaagcatatccggacgcattcaaggcgaatgtccacacaccgccgatgggccatttcggagatgtagaaaaggaaatcggtcgtgtctgcgtacagcttgcgtcaccggatttcaagtatatgagcggtgagacattgacactggagggcgcgcttggtcagagaccataatcggttcaaaaaagtaaaatagaaattgacagttgccacataattcgctatgatttgtcattgaagaaacgagttccaacgaggagataagtatgagacgatgtgcagatcataagcgaatcattgtggcaattttaattgcagccttaagtattctgtgcgcatttcacggaaatgacagcattttggaagtgcatcatacagagcaggtctgcctgcagaagtcccagacggcaatctccgatacgacactgcggaagattgaaggaaccgaaatcttcgagacgaatctcacgtcaagaatgcggtcatctgagcggatcgagcgaatgaaagcttcgcggaagaacggatgcgctgtttcttatctggcatgtcttgccatgcagcggccgatgcagagtctgtctgtcggtatcccggaaatgctggtgcagagtgatcttacaccacgatatttggttattttgtatttacatcgttccgatgggaaaaagtcccatctattcgcataacacgatcagattgttatgtataaaatgaaaattgaatagaaaggacgtaaactatgattacattaaaagtaataggtcttggtgtgattatttcttatggaatcgcctgcctgatgaagctgactatggtttgtattcagaaattcagtaagagaggggaggacgaggagaaatgagtatcttagatcttttccagggtatcggtacgatgtttgcgcagtcaccacagattgcgattgcgagagtcgtgttgatcttcttaggattcttattggtgtatttaggcgtgaagggaacgttggagccgctcatcatggtgccgatgggacttggtatgtctgcggtcaatgcgggcgttttgttcctcggtgaaaatcagatcggaaacctgatcattgatccgctgctttccacgaccgatgagctgatgacatacatgcagatcaatttcctgcagccgatttataacctgacgttcagtaacggattgatcgcgtgtcttgtatttatgggaatcggtatcttgtgtgatatcggttacgtgctcgaacacccatttatcagtatgacaatcgcgctttttgcagagcttggtacagttgcaacctatccgattgcgcgtgcgatgggacttgacgccggttcttcggcagccgtttccatcattggcggtgcggatggaccgatggttctttttgcttcgctgaagctcgcaccggagcttttcgtgccaatctcgattgttgcgtatctgtatttaagtcttacttatggtggctatccatacctgatcaaacttctgatcccgaaagaaatgcggggaaagcagattccgaaggagaagaaggtgagcaagatccgtccaaaggagaagattgtatttgcagtaattacaaatgcgctgctttgcctgttgttcccggttgcggcaccgctgtttttgagcttcttcgtgggaatcgtaatccgcgagaccggaatctctgcgtacatcaagatgattggagaaaatttcctgtattttgcaacgttcttcttaggattgatgcttggagttctgtgtgatgcaagcacgcttttggatgcaacggttgtgaagcttctgatcctcggtatgctgtcgttattgctgtccggaatcggtggtatcattggcggctatgttgtatatttcttcaagagaggaaagttcaatccgacggtcggcatcgcaggtgtgtcgtgtgtgccatctacagcgaaggttgcacagaaggctgctgcaaaggcaaatccggcagcatttattctggattatgctctcggcgcgaatatctgcggcgttatcacaacggcaatcctgaccggtatctatattacgttacttagttaaatcaaaatccccttctgtaccggaagcaagcgaaatatgctctggtgtggaggggattatttggttgagattgagttttgtttgacataaaatatgatacataatagaattggtttaagagataaaaagaggttaacaaatcggtatttttagaactaaggaggaatttatgaaaaagatactagtaacagggggaacaacttttgtaagtaagtatgcagctgaatattttgtgaatatgggctatgaagtatatgtacttaacagaaatactaagtcacaagttcggggagtaaaactcattgaaggcgatagacataatttgaatggtatattgaaaaacctctcttttgatgttgtggctgatataacagcttataacgaaaaagacattattgattttgttaaggaattaggttcttatggacagtacattatgattagttcaagtgctgtgtatccagagtatggagttcaaccatttcttgaagaatcagaaaaagccgcaaatatcttttggggtacatatggaactgataaaatagcagctgaaaaggcattacttgaaagagtgaaagatgcgtatatattaagaccgccatacctatatgggcctatgaataacgtttatagagaggcgtttgtatttgattgtgccttagcagatagaaaattctatttaccaaaggatggagatatgaaattacaatttttccatgtgaaagatttgtgcaggttgatggaagtgattataaaggaaaaaccagaggagcatattttaaatgttggtaatgctgaagcagtatctataaaagagtgggttacaaaatgttacgagagtttaggaaaaaagccgacttttgtaaatgtctatgaggaaattgaacagagaaattattttagtttttacaactatgagtactatttggatgtgtctcgtcaaggcgagatattctcggaaactacaactttagaagatggattgaaggatgcagctgaatggtatcttgaacataacactgaagttaataagaaaccatattttgagtttattgatgaaaacttagtggaaagttaa

SEQ ID NO: 1117 - DNA, 23761 bp, unidentified
  source 1..23761: mol_type = unassigned DNA
agatgggcatatctgattttggcgagatgcacagactttctactatgtcttgcccggatgtcatggtcatcaccaatatcggctactgccatctggagtttttgggcgacagggatggtgtgcttaaagccaagacagagtgctttgagcatatgatgccggatgcggtcgcagtgctgaatgcagatgacgacaagctggccacagtgcagacggtaaatggaaagcctgccatatactatggcaaggaatcagcttcaggtgttcataaatcagtatataccacaaatattgaaaacttgggctttgacggtatgaaggctcattttgtcaccccggagggtgagtttgatgcacaaatccatatcccgggtgagcacaatgtatacaatgccatggcggcagcggctgtcggattgcagcttggtctcacaatagctgagattaaatcaggaatcgagaaagcagagacaatcgcaggccgtaccaattttatcaaaacacacggcatgacagtgatagatgactgctacaatgcaaaccctgtatccatgaaatcctctatcgaggtgctttcacatgcaaagggcaggacaatagcagtgcttggcgacatgggcgagctgggaagcgatgagaaaaagttgcaccatgaggtaggcgaagcagttggagagaatcatatccacactctttttgccgcaggagagcttgcaaaggaatatgcagccggggcagcggagaaatcatccgatgtagacatccactatttcgaggatagggagaccatgacacaggagcttctttcatatgtgaaggagggcgacaccatactggtgaaggcatcacacttcatggagtttccgaaggtggtagaggctctgagtaagtaaaattaggtaaaatcaatcgggtagaaattaattcgatatttaattattgcgaggaatggatattctccaagcctcataatattataaaagaaagagagaaaaataatggcacagaatccaatcgtaacaatcacaatggaaaacggcgatgtaatcaaggcggagctttatccggaaatcgcaccaaacacagtaaacaactttatcagcttaatcaatcacaacttctatgacggagtatgcttccaccgtgtaatcaagggcttcatgctccagggcggagatccggacggaaacggcacaggcggtcctggctatgaaatcaagggcgagttcacacacaacggcttcaaaaatgacttaaagcacacagccggtgtactttcaatggcacgtaccatgatacctgattcagcaggcagccagttcttcatcatgcatcaggatgcaccacatctcgacggtgagtatgcggcattcggcaaggtaatcgagggcatggatgtggtaaacaagatcgctgaggtgcgcacagactacatggacaaaccacttgaggctcaggtcatgaaaacagtaacagttgagaccttcggagtggactatccggagccggagacagtttaatgataataattatcgatgaggcaagcgcaaaacttgcctctttttactatcatggcgagatattcaagctgcagtggagaagtgtggcaggcaaggcatctatgtcagaagagctgcaagaaaaactgtatggtgcactaccgggaaagttgctggatgagttgcagaagaaactgctagacgagcagcaatatgaattacaggaaaaattacaagaaaaactacctgatgaactgcgggaaaaactgtatgttgcgctaccggctgatgaatcaattaatgacttccaaaaaacgacaatccaagaatctgcagataacaccgcgaaagctaatacgggaaatctaagaataccgaaagctcccacagactacatctggatagtatcaaacaggcagcagaagcaaatagctgactcactcggcatagcatcagtaggagaaccgcagtgcggcacgcgctatgcagtcgagagccttgcagagcttgatattgagtatctggagcgagtgcgcaggcggtataatcacatcccgtgggacatcggcgagacagacaggtgtctgatacgtgagctgtccctgtcagaccttcctgcgctctatgagctctatgacaagcccggtatgacagactttgtggaaccgctttacgactacgagacagagcttgaataccagaaagcatacatagagaacatgtatggattttacgagtatggcatgtggcttgtattttccagggaaacaggtaagctgataggacgggcagggcttgagcacaatgaaatgggctacatgatagcgccggaattatggaaccaaggctatgccacggaggtgtgccgtttcatcatagactatgcgcgcgaaaatacagactttgaagagctttactgccggatagatgagagaaatgaagcatcggttcgccttgcaaaaaagcttggatttacaaatagcgggcatatggatgaagatataaacgcttctatatatagaaaaaacataaaaaacaatgaaaaacattgaaaaatatgcaattaggcaataaaatataaacatagtttaacgatttggaggacgaaaaaatgaagaaatatgcatatggagtagatataggtggaacaactgtaaagataggctttttcgagaccacaggaaagcttgtcgatacatgggagattcctacacgcacagagaattccggcgagctcatcctgcctgatatcgcagcatccatcaaggagaataacgagaagcatggcatagagatgggtgacatcgagggtgtaggcatgggagtgccgggacctataaaggatgacggaacagtattgaagtgtgtcaacctcggctggggcgtgttcaacgtggcacagtcactctcagtactgtgcggcggtatcaaggtaaaggccggaaacgatgccaacgtagctgcactcggtgagatgtggcagggtggcggaaagggtcatcaggatgtagtcatgatcacactcggcacaggcgtaggcggaggaatcatccgcgaaggcaaaatcgtagccggagtaaacggagcaggcggagagataggacatatgcctatggtagatgatgagtcagagtgctgtggctgcggcaagaagggctgcttagagcagtatgcatcagcaaacggtctcgtaagagtggcagagagatatattgcagcacacagggatgtggcaacaaagcttgatttaaatgcaggcttcacagccaaggatgtatgcgatgcggcaaaggcaggagatgcagcgggcattgcagctgtagagcagtctatgaagcttctcggcaaggcaatggcagcagtagcatgcgtcatggaccctgaggtatttgttgtcggcggaggcctctcaaaggcaggcagcatcatcatcgatactgcagcaaagtactataaagagtatgctttccatgcaagccgtgagacagagatcaagcttgccacactcggcaattcagcaggcatgtatggcggagtaaagatggttatcggctaacaacataagattgcaatttttaaagaaataaaatataatggctactaaagatacactacaatcgaggtgagactattggcagattactcaacagaagaattagaaaaaatagcggacaaatttcgctcagataccagcggtataaggggaacaaaggattttacgagcccggaggagctttacgatgagctgaaaaaggaaatcaaaaagtaccatccgtcggatgacacgagccttgtggacaaagcctacagggtagcttatgatgctcataagggtcaggcgcgtaagtcaggagagccttatataatacatccgctttgtgttgccataatactcgccgagctcgagctggataaggaaaccattgcagcaggactgctccatgatgtgctggaggataccatcatgaccatggatgagatgcgtgcagagtttggagacgatgtcgcacatctggtggatggtgtcacgaagttaaaacacctgcacctgacagacagcaccaaggatccgaaggacaagaatgcggacaggcttgagatgcaggctgagaatctgcgcaagatgtttctcgccatggcaaaggatatcagagtcatcctcataaagctggcggacagactgcataatatgcgtacactcaagtaccagtcaaaggaggcacagcagcgtatcgccagagagacacaggatatctactgtcctatcgcgcagcgacttggtatcagcaagataaagatagagctcgaggacctttgtatgaagtacctctatccggatgcctactacgatctggtagagaaggtagccctcagaaagacagagcgcgacacctacatccagggcctggtaaacgatgtcaagaagtatgttacagatgccggcatcaaggctgagatatacggcagggcaaagcatttcttcagtatatataagaagatggtcaatcaggacaagacgatagaccagatatatgacctctttgccatcaggattctggtggataccataccggactgctacgcagtgcttggtatcatacatgagaagtataagcctataccgggccgtttcaaggactatatcgccatgccgaagcagaacatgtaccagtcgcttcacacgacactcataggtccgagcggacagccgtttgagatacagatacgtacctatgagatgcatcgtacagctgagtacggtatcgcggcacattggaagtacaaggaaacaaacaacggcaatgccactaccaccactgtcaccgaggaggagaagctcagctggctgcgccagatactcgagtggcagcaggacatgtcggataataaggagtttatgactttattaaagagtgatttaaatttattctccgacaatgtatttgcattcacaccgtccggcgatgtaaagaacctgccaaagggctccacacctatagactttgcctacagcatacactctgcggtcggcaacaagatggtcggtgccaaggtaaacggcaagctggtgccgatagactatgtcatcaaaaacggtgaccagatagagataatcacctcacagaactccaagggaccaagccgtgactggctcaaggtcgtaaagagcacacaggccaagaacaagatcaaccagtggttcagaagtgagctcaaggaggagaatatacagcacggcaaggatctgatagcagcctatgccaaggcaaagggtatcaactttgctgagataaacaagcctgagtatcaggagaaaatacgccgcaaatacggctttcacgactggaactcatgccttgcaactgtcggccacggcggacttaaggagagccagatagtcaacaggatgtacgacgagtacaagaaggatcatgtggtgccggtgacagatgcagatgtgcttggcagcattgcagaaaagcagcagacggcagcaggcacacagccagagcacaagtcaaagagcggtattgtggtacacggactctatgacgtggctgtgcacttttcgaagtgctgcaatcctgttccgggagatgaaatagtgggctttgtcacaagaggccgaggcatctccatccacaggacagactgcgtgaatattatcaatctgtccaagatagaaaaggacaggctcatagaagcagagtggcaggatacagccctcatggacaacggtgccgagtatcaggcagacctaaagatattctgtcatgacaggccgggactgctcgtagatatcacaaagatatttaccgagaaggaaatcaatatcagtggtatccagtccaagaccagcaagcagggcatcgctacaatcgaggtatttttcaatatcaaaggcagggaccagataaaggttctcgtggagaagctcagacagatagaaagtgtaatagacgtagagaggaccaccggctaaatcccggtggttcttgcgtgaagcataacatataacagacaaggagtacactcatatggtaaatatgaagatagaccacttcgtagtgggaccggtgcagaccaactgctactttgtcaccaatataaagacaaaggaaatgataataatagacccgggcgcgtgtgctaatcagctcgccaaaaaggtggacgagtcaggcgcaaagcctgtagcaatactgctcacacacggacactttgatcatgccactgatgcaaagccgctcgcagaccgctacggcatcaagatatatatccatgaggcagacaaagccacactcgatgacccgcagcttaatgtcagctacatgatgggccagtcaaagactttttatgcagatgtatttttgaaggataagcaggagcttgacatcgcaggctttcacatagtagtgcttcacacaccggggcatacaccgggcggctgctgctattatttcccgtatgaggacgtgatctttacaggagattcgctgttttgcggctcaatcggacgtacggatttcaagggcggcagcatgtcagaccttgtgcgcacagtgaaggaaaaaatcatgacactgcctgagcatacagaggtgtacccgggccacaacgacacaacaaccatagaaaacgagaggatgtataacccttacttatgatagtagtagtatttaataaaccggattttgaatatgatgtgcactcactgctcaaggagttcttcccacaggaggatgtgcagatgtactatagctgctcacctgatgaggtggagggaaaaaacctggcctgcacacaccatgagatgacagatgatggcgtaaaggaatttgcggatgcctcacaggtatttaagatagactatgtgggcgatgaaattgcagtggagtggacgctgaatagagacggcggaaataattccatgacagatgagatgcagcaagccgacgaaagtgacattaaaacagccggagaaagtatctgtacaaaaatatccgtgaccggcacagaccgtaaggagaccaaaaaccgcctcaagctcgccctgtattccatgatagaaaagggcacaggaaagagccttccgtggggcacactctcaggcatcagaccgaccaagatagccatgaaatgcatagaggacggcatgagcgataaggaaacctacgactatctgaaggaaacctacctcgcaagcgatgagaaaatcgacctctcaataggtatagcaaagcgtgagaaggcactgctcgataaggtggactatgacaacggctacagcctgtatataggcatacccttctgcccgagcacctgtgcatactgctcgtttacgtcatacccgctcggcgtgtggaaaaaccgtgtggatgattacctcgacgcactcgagaaggagatagactacacggcacagaaattctatcacaagaagctaaactccatctacataggaggcggcacaccgaccacactaagctctgcacagcttgacaggcttatcagaaaaatcaaatgcagctttgatttaaaggactgcctggaatttacggtggaggcaggcagaccggactccatcacgagagaaaagctcctggcactaaagaaaaacggcatcagccgtatatcagtaaatccacagaccatgaagcagcagacactcgatataataggaagacaccacacagtagacgatacgatacaaagcttcaagctcgcgcgtgagctgggctttgacaacataaacatggacctcatcatgggacttcccgaggagtcactcgatgatgtaaggcacacaatggagctggtgaaggaactggcacctgacaacgtcactatccactcactcgcagtaaagcgagctgcaagactcaccatcttcaaagaccgctacagagatatgcagatggtcaacacccaggagcatatggatctctgcgcagcctactgtaagcagatggggcttgagccatactacctctacaggcagaagggcatggcaggcaacatggaaaacgttggctatgcggcaaagggtaaggccggtgtatacaacatattgataatggaggaaaagcagaccatcgtggcctgcggagccggagcaagcaccaagcgcgtctggcctataccaaatccggatggcacacaccgcatcgacagatgtgagaatgtcaaggatgtagggcagtatatcgcaaggattgatgagatgatagagaggaagcagaggctgtttgaggaaaaataggcagcatgacatataataatgtataattatgggtgctgtaatactatagcggttagcgaatgtgtcaaaaattataaagaaaacctaatattcattgacaaagaattaaaaatgggtgaaaatatattattgaaaaccctgattagatacagaaaaagatacaaataaccgaataaaacatacgtaaaacagaataggctaaaataattcggggggggtacaaaggtacctcccctagaacaggtataaaggaaaataaaagataccataaggagaatttggaaagaatgtacagaaagaaaggcagaggatggacaaagcatatagactttatgcttatagatatcgcatgcattgttatagcattttttatttcatatgtgatacgatttggctttaataacccatatgtggacaaggactaccgtatactgggggtagcatttcttctgatagatttctttgtggagataatggcagactcattcaagaacgtcctaaaacgcggatatctggatgagtttatatcgacctgtaagcatgcaatgcttgtatttttggtgacagcacttttcctgttcaccacacagatggctgatatatactcgcgattatcattttatatcatgtttccgatctatgtgacaataacatatgtagcaagaattgcgctcaagagcttacttaagaaaaagagccttggagcatctaagaaatcactgcttgtcatagcacctgatgcaatacttcgtgatacactgcgcacagtggagaaaagctgtataggctatacaaagatagtagcagcttcactggatacagatatgaagggtgagactatatgtggcataccgatagtagcaaaccacgatggcatagtggactatgcgtgcgatgagtgggtggatgaggtacttatcccgccgtgtagcgaggatgaatatccggagaagatggcagatatattccttgagatgggaatagccgtacatacaggaatagcaaaaaacggtacagcccagggtggctataagcagatagaaaagataggcgactacacagtagtcacatcaagcgtcaactatgcaaatcacagcgcacttctggtaaagagaggaatggatatagtcggaggactggtgggctgcctgttcacacttatcatcatgatatttgtgggaccgatgatatacatagcatcgccgggaccgatattcttctcacaggagagaatcggcaggaacggcagaaagttcaagatgtataaattccgcagcatgtacatggatgccgaggagcgaaagaaggagctcatggcacagaataaagtgggggacggaatgatgttcaagatggacttcgacccgagaataataggcaataaggtgctgccaaacggaaagaagaaaaccggaattggacagtttatcaggaaaacaagcctggatgaattcccacaatttttcaatatactagtgggagatatgagccttgtgggcaccagaccaccaacactggatgagtgggagaagtatgaacctcaccacagagccagaatgtcattcaggccgggactgaccggactgtggcaggtaagtggaaggagtaatatcacggactttgaggaagtggtaaagctggatacccagtatattggggagtggagtgttaagggggatgtaaagataatattcaagacgtttgtaggagttttgaaaaacgatggagcagtgtaaaaatgagtaaagtacagaatgtattcttgattggagcaaaaagtcttggagcatatggtggatatgagacgtttgtatataagcttacagaatatcatcaaaataatcctaatataaagtatcatgtagcctgcaaagctaatggcgatggatgtatggatgaaacaaaattggataatgttaaaagagtatctgattcagaatttgaatttcataatgcgagatgctttaaaattcatattcctcaaattggaccggctcaggctatttattatgatgttgctgctttaagagagtgttgcaaatatataaagaaaaataacatagaaaatccgattgtttatatcatggcttgcaggattggtccatttgcaaaacatttttataaggaaatacataggcttggtgggaaagtgtatctcaatccggatggacatgagtggatgcgtgctaaatggagcaaacctataagaaagtactggaaaatatctgaacagatgatggttaaatattgtgatttggctatttgtgattctgtaaatatagaaaaatatattcatgaacaatatgatggtaaagggattaatggcaaaaatcctaatacgacatttattgcatatggagctgatctgacacctagtaaattatctgatgatgatgaaaaacttgtggaatggtacaaagataaagggctaagcaagaaaaattattatttggttgtaggaagatttgtgccggaaaattcatttgaaataatgattagagaatttatgaaatctaaatcaaagagggattttgcacttatcacaaatgtgaatgagaagtttttaaatgaattggaaaataaattgcattttagaggtgattcaagaattaaatttgtaggtacagtctatgatcaggaattattaaagaagattagagaaaatgcgtatgcatattttcatggtcatacggttggaggtacgaatccaagccttatagaagcccttggaagtacagatttaaatctattggtggatgtcggtttcaataaggaagttgcagaagattgtgctttatattggagccaggagccgggcgatttggcaaatcttattgataaggcagacgtaatgaatgttgatgaaattacaaaaataggaaagaaagctaagaagcgtgtttcagaagagtacacatgggataagatttgtggacagtatgaagatgtgttttaaatataccagatttgtaaggttgtagagtaaaacgttaagtatatagatgggagcaaatacaatgaatattattttattatccggtggctcaggaaaacggctttggccactttctaatgatgtgcgtagtaaacagttcattaagttattcaaaaataaagataaatatgaatctatggtacagcgagtttaccgtcagattacaacaatagatgcagatgctaaaatcacaattgcaaccagcaaatcgcaagcgagttcaattaagaaccaattgggtgaaaaaacttcgatatgtgtggaaccgtgccgcagagatacttttccagcgattgtattggctgtgtcttatcttcatgatgaactaggagttagctctaatgaagcagtagtagtatgtccggtcgatccttatgtggatgagacctattatgaatcagttgaaattttacataaactagcagaacagggcaacacaaatttaactttgatgggagtcgaaccaacttatcctagcgagaagtatggttatataatccctacaacaagtgataatgttagcctggttagagaattcaaagaaaagccagatgcaaaatcagcacagaaatatcttgagcagaatgctctttggaatgctggaatttttgcttttaaactgggatatttactagataaagctcatagtatgattgagtttgacaattataatgacctttttaataaatatgaatcattggaaaaaattagttttgattatgcagttgttgaaaaggaatctagcattcaggttatgcgttatagtggtggttggaaagatgtgggaacctggaatatgatggcagaggttatggcggataagacaaagggcaaagctattttggatgaagtttgcgaaaatactaatgtgataaatgagctcaatattcctattctatgcatgggatgtaaagatatgattattgcggcaagtggtgatggtattttgatttcagataaggaacgtagcgactatatgaaaccgtttgttgagaagatagaaacagaggcaatgtatgctgaaaaatcatggggaacatatacggtaatagatgtacaccctggttcaatgacggtcaaaatctctatgaatgctggagaagcaatgagttatcatatgcataatgaacgcgaagaagtatggacaattgtagctggaacaggaaaggtaattattgatggtacagagaagatccttcaaaaaggtgatgtaataacgatagaagtaggttgcaggcatatgattgaagctattaccgcgttagatataattgaagttcagcttggaaatgaaatttatgtaggcgacaaagttaagtttccatttaattaagaaaaattgtaaatagaataaactgttatggagtaaataataaatgaaagtactattagtagatcaaatagctaaagtaaattataaatacacttttcccctggcaaatggattaaaaaaagcaggtgtagatgttttgttggcaattgatcagaaagaagaaaaagaaaattgtttatgcgagaggattaatctgtttaccacggacgaaaaaaaaatcggaaaattggcgaaaatgtgcaattatattgcatcatataagaaaatagaacaattaattcataatagaagtattgatgtgcttcataccgaatggtatacattctcgccaatcgattatttgtttttgagaaaaattaaaaaaaagtacggagtaaaatatgtagctacagtacatgatatattaccatttaatgaaaaattttatgataagtgctttcataaaaaactttatgggcttgcggattctataatacttcaagcaccgggaaatatgaaacgttttgctgaactttttccagaatcaaatgacaaaacacatatgattccacatggtcatatgctggattacattgaacaagttgatcaaaaagaaagcagggagaaacttgggattccttctggaaaactcgtgtttttgttttttggtcagataaaaaaagtcaagggagtagatattttacttaaggcattgttgaaacttaaagagcgatatcccgatatgtacgttgtgatagcaggaagcgtttggaaggctgatttttcagagtgtcaagaaattattgataataatgaattaaatgattgtctcaaaacagatattagatatattccagatgaagaagttaaatacttctattctgcttcagatgtttgtgttttaccatatacggatgtttaccaaagtggtgtgattcagctggcatatggatataagaaagctgtaatatcttctgatttaccagcctttacacaatttgtaaaggaaggagagactggatatatatctgaggcaggaaatgtagatagtttagtggcggctgtagaacgagcaattaaggacagaaaaagattggtagatgtaggccaatctggttatgaccttgtgaaacaaacattaaattgggataacctggcaaagaaaatagtgagtgagtgttatatggtttgattcgatttgtacaatcttatatttgtgaaataagcttataagattgtgcaaattttcgaaggaaaagcttaaaatagtataaattcaagaagaggagaaacatgagttatattttcatcataatatgctttttgtatggtctttgtgcagtatactttgcaaaaaaaaacgattacacaatgttgtgtttctttttagtagcagtattatttcagaacattatagtgatttgtttttcaaatacagtatcatcaatttggattactattttttcattagtgaaagaggtaatgctttattttgctgtttttttatatatttttagaagaaagaaaataacaggggggaagaaaactattattttgtcacttgttctggttataattttcgtcgaaaatttaatcgttacagatacatctttttcagcatcggtgatttcacttagacaatgcataattccatttttagggataacaattggaaagaatctttatattgatgataaaaaagtaattaaattactaaagtttattgttcattgctcgatatttttggctatatttgggttgtttgaacttataattttaggtgacgagttttggataaaattagggtatgcacagtatatgtatgtgaaacaaggaacattatcaagtcaacttttcaaaggcgttacaagaaatttctatacatgggattttagaaatattccaattagaagaattgtttccattacggcagaccctttagcaactgcacatttgatattcattggatttgcaattatattttcaggatgtgtaaacagttttatcaataagtcatttacaaaaaaaaatccaaatcaatattttgtatatatgattttattgtttatgtgtagtttcctttctttatcgaaggctatttttgtatttatggcaattacatttgctgtaattgcatattataaaaagatatttccaccaaaacttgtaaaatatggagccgttataggcggagtattaatattattgtatattttgagaggaatacaagatatgactgttgcaacagcaacctctaatcatgttgtaggtttgattaatggatttcaacattcgtcttttttaggaaagggattgggaactgctggtgttatgacagcaaaaatagcgaataattcaattacaactgcagaaagctatgtaggcacgtatgttcaacaaattggatatattggatttgcaattacgttaatttatttcattaatgtatataagcaactgttagtaaattggaaaaagtataggaatagatatacaattttagcaattgcattattcctagggattatttttgaaatgtttttttctgagagttcagtgtctgttatgggaacatgtatatattttatttttattggaattgccacaaaagataaaatttataagtgaacagttccggattagtatagagaggatacaaaatgaaaattaaattattttatattcatccgacaaattatggaaatttaatgatggcatgtgcttttatgaagtattttacagatatttcattcaaaagaaaacttgatgtaccagaattctatttggatgttttggatgatgacgagcttaatcttgttaaagagtcattgccagaaggtataaaaatttatagagaagatttatataaccgtaagcgtagaggaatatgtggaaagttggagaaacttgtaaatattcctagagagattttatataattgcaaagaatatgatatgtgtgtggtacttggaggtgattgtatatcacaatactattctactcaggtatttgtgagcgatatgttcaaattttactacatatctaagaaaaataatgtttatttgttaggacagacaatgggaccattcaaagggtatgctgtagatttagttaaacgtaccctggagaatacaatgatttatgttcgagatcacgattgctatgattatttaaagaaaaaattcgacttcaaaaatttaaaggagtcgcgcgatcttgcttttttggatataccatatcagaatgatgcaagtcaacaagaaagggtcaaatcggaatttggcattaaaaccgattatattactatagttccttcgggagctaggcgacaatatacatctgatactgaaaactatataaatgaatatattaagataatacattatatagtggatgttttaaaatatgatgttctattacttgcgcacgtgattcatgtatcagattcaaatgataaaattattattgatgaaatagtaaagaaacttgaaccacgatatgattctcatgttcatgttatagaccatttaatccatccatatgaggcaagaattcttttgggagaaggaaaagttacaattacaggtcgcatgcatgctgcagtatcatctattaatatgggaacagtacctatttgtttgtcatatagtgtaaagtttaaaggtgttattggtgatgattttggattaaatgattatatttatcaatgtcgtggtgatgatatttggtatagtggaaatgtcagcacagaagtaatagcgcgtttaaatatggtacttgaaaacaggaaaagtattgtgaaaaaaattaatgacaagctggagctagtgaaaaaaaaatcgatgttacagattgaagaactgttttgaaagatagtaacggcattatattaaggagaattgatggaaaattcaggaaataaagcggcgaaagctgggattgcatatacagtagggaacgtcttgttgaaaggaatagcatttctaacgctgcctattttttcacgtattcttacaacggaggaatttggattctataatttatatgtttcgtatgaaactattttaacaatatttgttggagtgtgcttatatggttcgctacgaacagctaaatatgattatcgtcatgaattcgaatcatatgtttcgagcacattgatgttgagtggatttgtatatataattgtcatgttttcaggaaatataatatatcctattatttctaagagtttcgggtttgatcgcgtcatacttaatattcttattactcatagttatgctatgttcatttttcaattttataatacatggttagcgttagattttaagtataaaaaatttttagtagtttcgggaattaattcaattggtgggactacgttttccatatttttaattcttgttgtattcaaaagtcatagatatattggtcgcatctatggatatgcaatagtaccaatatgtgttgcggcaataatttggttatctttttttcgagaggcgagaagaaaaaaactgatattatttaataaaggatactggaagtacggtctgagcataagcattccattagtagtgcatacattttcacagcaaatcttaagtcaatttgaccgtataatgattaatactttggtaagtgttgcagcggttggaatttatggttttattcagactattgcaagtattttacagataattgtgcaatctatggacaatgcgtggtcggtatggatgtatgaacaattagataaaaagcaatattcacaaatacaagagaaagctagaacttatatattattgatgaatatcttatatgtaggctttatttcacttgcaccagatgttatacatattgcaggaactaaggaatattatcacggaatctcgatgattattccactttcttatgctatttattttatttttttgtattctttaccagtacatattgagtatttttataagaaaacgaaatatattgctatagggacaagcatagcagcagtaattaatattagtcttaattatttctttatatgtagttgtggatatatggctgcagcatggacaacattagcttcatatattttactttttgtgtttcactggtatatagcaaaaaaaattgacaataatcatatgtttccgacaagatttattattgaaagtatagtggtattatcaatattctcagcttggattttatttgtagttgatagtatggcaattcgttggggatctatggtgttttttattaccatacaattgggaagcaattttaaaatagtcttgccaataattaaggggacgtttaataaattcaggaaggaataggtttatggaaactttaaaattgtataatggattaaatataccgtgtattggatttggaacggatagaacatttatttattttcgaaaaaacatattggcaggaggtattgcgttcttgaaagatgtaactgtaggacatcgatattactggaaacgtgatacatcgattgttaatattgttgagcaagctccgaatattggctgtagtctctttgatacatcgagtgcatatggtcaaagcgagcgagttcttggacattgcttaaaaaagtatccgagaagtgacttttttctgataacaaagctttcaaatcaggaacaaagagaaggtgatgttcgtaaggcactttttagaagcttaaaacatcttaatacggatagtgtagatttgtatttgatgcattggcctcagacgggaacatttttggactgttggaagcagatggaacagctttataaagaaggatatgctaagtctattggggtatgtaattttaaagaacatcattttgaagaattaatgcaagtggctgaaatcaaacctatggtttgtcagattgagtcacatcctttatttccacaaaatgatatgcttatgtattgtaaaaaaaacaatattcaaatgatggcatatactccaacaggtcggatggatgttcgtataagagaaaatgaggcattacgcataatttctagaaagaatcagaagaatattgcacagatagttttgcgttggcattatcaacgaggcgtgattccgattgttaatacaacaaatataaatcacctgaaagataatatgaatatttttgatttttcactcgattcaagtgagatgcaggtaattaatggattggatattaattgcagattaagatatgatccggataccgttgattttacaaagtgttaaggtaataggagaacattatggttgacaaaataaaaaaagatatatgtactggatgtaaaatgtgtggcgatatctgtcctacaggagccattggcttttcgacagaatatgatggttgttggtatcctacagtagatactaagaaatgtattaattgtggtttgtgtgaaaggcaatgtcctgcacttaattatatcgagtcaattaactttgatgaccccaatgtgtatgctgcatggactaaggatgacaaaattcgatttgacagtacttctggtggaatatactatgaattagcaagttatttcattaattccggtggatatatagttggatgtgttttttctgatgattataagtctgctaaacatgttgtaggcagaacatataaagatttgcaagcgattatgggatctaaatattttcagagtgatactgcaggaatctacaaaagagtcttagaattattaaaaagaaatgaaagagtattattttgtggaacaccttgtcaggttgcggcgcttcgagcatatttaggaagagaatatgagaacctgtatttattggattttatttgtaaaggaataaattctccaaaagcatatattgcttatatagaagagcttgaacaaaagtataaatcgacggtgaagtgtgttaggcaaaagagtaaaaaaactggatggcaaagtcttgccacaaatattatttttgaaaataacaaggaatatcataaggatcgttatacagactggtggattcaagggtatacatgtggaaatctttttatgagacaaaattgtcaaaagtgtttatataaatctatgcctagacaggcagatatttcatttggagatttttgggggatagaaggctgctctaaagtagattatgaaaaggggatatcagtggtatttgttaattcatcaaaaggtaataagcttttaaagaatataaaggacaagattcatttagagactcggacattagaggatgtattgattggaaatccgtatctatttggacaagcagtacagaagggagacagagaaagattttttaaattacttgatacgaaaccatttagtgaagctgtcaaggctacttacacagagaatgttacacaaaaaatgaaaagatatataaaattgtttttgaaacgtgttttaaagcgaaaaaaatggtaagtgcttacgaaatgaatgggatatttgattatactataaaatggagagataagcgaaatgaatagtaaaatgatttttcagaagataagaaaaatagatttgataaaattttttaaatacaattttttaatgccgcaggtaaaaagaacgaagggcgcatacattattccatttaaaggggcaatattggaaattgataaaactgctgaaattgtacttaatggaacaattcactttggaatcaatcatttgaaaggatcaaaagcagaaacgtatattagacttgcggaaaattcaaaatggatttgtaaagaagatgttttactcttttttggaacattcattgacgttcaccaagatgctttgttggagagtgaatttttttctgcgaatacaggatctgtaattgttgtaggtaagcatatttcattaggacatgatgtaatgatggggagaaatattgttatatatgatagtgattttcattcaattcctgggccagatggaaatccaattaatttttcgaaggacgtaataattgaggatcatgtatggcttacaaataatgttactgtactaaaaggagtaacggtaggaaaggattctttaattagtgcgatgacattaatacgtaaggatattcctgaaaagtcattggttgcaggaataccaggaaaggtacttaaagataatgcttgttggagcagagaatacattcatgactacgaaaaacaattttggaaatgagattccgtgggaaggtgcatataattattgggaaggaaacaaaatggagtatataaaaaaattattgttaattgtaggttgcatggcggtaatagttatttttaattgtaatattgtttatgctgataatgtatgtaatgttgagcttggagcaatagatggaaccaatggagcagatgtagtatcatcaattcgttgcaggacagaaaagtatgatctaagccagcaaaaagtaaatgtgaatgtgggaaacagcggaataaaatacggagtatttttttacgatgcatatggaaaatacataagctggacaggatggatcgcaggaacagagtacgcagttccagcaaatgcatcatatgctagagttgtattacgttatgatgataataggaatatatcatcaaatgaattgaaggcattgaataatttcattaaaatatcttatttaattaatgaatctgaatgggaattaccgattttatagtactatgaaagatatattaaattaagtagtgcgttcagaattataagtaatgtaattaaaaataaaacaacaaatatcatgaggtgtttggattattgctttagcagtattggatatattatgggctacagtttgtacagattatcataaacaaatgtatgttgatagacggttttctacacagcttcttactgagcaaagttcattaattaaatcattggttatagatatacagagtagtgacagagcaaattggcgaaagcacatttttcgaacatgctcagaacttgcttgttcaaaaatatataatattttcaaagatgtatttaagtgtgaaacaagggtaagcctatacctatagacaagaaacaaaaattctattcaagcaaaatttttatgaataataatggattgaatattctcagaccaaatgaaattgatgatgccaatatgtgggttcagcataataatcatgatgtaaagttttactggggaattgtcgtctgtgcaattgaggaaccacatgtggatttcatagtgcaaattgatttcttggaggaagaacttgattttgtagacaaaactaacgatgaggaaataagaaggtttattgaacgtaatttgacagcatatgtcaactttattcatttatcatatttactgagtctaagtggtaaaaatcagattgaggaggtctaatatgagtaaaaaaggacatgatactaaaaaagtttcaatttcagaaagtgataataagacaaaaaaatacactattgatgagttgttggaattgggagaaaagagaatcgtattaagttggcagagactattgagaaaaataaagacaataaatctgaataatctgtcgtttatggtttaataaacaaattttagttgatataaaagaaagagaggcaatacatatgaattacaatgaagagtacagccgctggctcacatcagcaacagccgatgcagatgttgcagcagagcttaaggcaattgaaaatgatcctgcaaagatagaggatgcattttacagaaacctcgcattcggtacaggtggtctccgcggtacaataggtgcaggaaccaaccgcatgaatgtatatacagtggcaaaggcttcacagggccttgcaaactatcttgtagcaaactctgatgcaccatcagtagcaattggctatgatagccgtatcaagtctgatgtgtttgcaaaggttgcagcatctgtatttgccgcaaacggcgtgcaggtcaatatctggccagagcttcttccggtgccaaccgtgtcatttgccacaagatatctcggcacatccgcaggtgtcatgatcacagccagccataaccctagcaaatacaacggctacaaggtttacggggctgacggctgccagattacaacagaggcagcagcagagattcttgccgagatagagaagcttgatatctttgcagatgtaaagcagtctgactttgagtccggtgttgcagatggtcagattaaatatatttctgatgatgtgctcacagcctttgttgaagaggttaaaaagcagtctcttctcgatgacagcgtaaaggtggacaagaacgtggcaatcgtttactcacctcttaacggaaccggtcttaagccggtgcttcgcacattaaaggagacaggctacacaaatatcacagtagtaaaggagcaggaaaatcctgacggcaatttccctacatgcccatatccaaaccctgagattaaggaagctatggcacttggtatggagtatgcaaagaaatgtaacgcagaccttcttcttgcaacagatcctgactgtgaccgtgtcggaatcgcagtcaaaaatgcagcgggagagtacgtgcttctttcaggaaatgagacaggtatgctcttattaaactatgtctgcgagcgaagaattgcaatgggaactatgccaaaggaccctgtactctgcaagaccatcgttacaatcgatatggcagacagaatagcagccgattacggggtaagaacagtcaacctgctcacaggctttaagtttatcggagagcatatcggacgcctagagaaagagggcaaagctgattcatatatctttggatttgaggagagctacggatacttaagcggcacatatgtgcgtgacaaggatgccgttaatggggcatatctcatctgtgagatgtttgcttactataagacacaaggcatcagcctcattgacaagctcaattctctctatgagaaatacggctactgcctcaatactcttcactcatatgagtttgacggctctgcaggctttgcaaagatgcaggatatcatggctgagttccacaaggggcttgatacaatcggtggcaagaaggttatcgagtgccaggattacagcaagggactcaacggacttcctaagtctgatgtgctcaagtttatgcttgagggcaactgctcagtggttgtgagaccttcaggaactgagccgaagcttaagact

SEQ ID NO: 1118 - DNA, 8689 bp, unidentified
  source 1..8689: mol_type = unassigned DNA
ttgataaccaaagcaaatttccagagaagatggagagtttgtccggacagtcaaaattttctctggaaaattgacaacaaacaattagaaaagacaaaaacgatagactacaggggtttccaaataacaaatagtgaaggagcgattcttatggaggaaaagaaatacttaaaatggtacaacaagataggatacggatctggtgatattgcgggaaatgtagtgtatgcattcctgacatcatttgtgatggtatatttgacagatacgattggattggcatccggtatagtgggaacactgattgccgtttccaaattactcgatggatttacagacatcttttttggatcaatgattgataagacgcatagtaagatgggaaaggcaagaccatggatgctgtatggttacattggttgtgcaatcacattggtagcctgttttgcagttccaacaagtcttggcaggacggcacagtatgcgtggttctttattgcgtatacgctgttgaatggcgtgttttatacggcaaataacattgcttattctgctctgacatcacttgtcaccaagaacagtaaagagcgtgtgcagatgggttcttaccgtttcatttttgctttttcaaccagtcttctgattcaggcagttactgttggatttgttgcaaaatgtggtggagatgcagccgcatggcgtatggttgcaattatttatgcagtgatcggattggttgtgaatactatttccgcattatctgtcaaagaacttccggaagaggaattaaatgaaggagacacaacaggtgaagaggaaaaatatgggctggttcaggcattcaagctgctggtaaagaataaattttatctgatgatctgtggtacttatattttacagcagttatatagtgcaatgatcggtgccggtatttattatatgacctgggttttgaaaaacaaaaatctgtttggacaatttgcctgggcggtaaacattcctcttatcattgcattaatctttacaccaacgctggttggcaaatggaagggtatgtataagctgaacttgagaggttacatccttgctgtgattggcagagctcttgttgttgttgccggatatatgggaagtattcctttgatgatggcatttacagcattagcagcattaggacagggaccttggcagggagacatgaatgcagtgatcgcatcttgttccgagtatacatacctgacacagggaaagcgtgtggatggtacgatgtattcctgtacttcacttggcgttaagattggcggaggtattggaacagcagttgtaggatggctcttagaacttagcggatatgtaggaactcatgctgtgcagccacagtctgcactgaatatgatgcagtttatgtatctctggctgccgctgatctttgatgtgcttattatgtttattctttccagaatgaatgtagaagagacaaatgcaaagatcaaaaaagaaaaaggaattacagtagaagctgctcagcagtaatgagcagaaattggtaacaggaaagcattgtcttaattgaataaacaattacaggcaatgctttttgttccgtaaagaaaaggaggaatggttatgggtagcattttagtattaggtggagccggatatataggttcccacacagtttatgaattgatcgaagcaggaaatgatgtagtagttgtagataatcttgagacgggatttcgtgcagcggttcatccggaggctaagttctatgagggggacatccgaaatcgcacttttatagattccgtgtttgataaagaaaatatagatggagttatccactttgcggcaaattcgcaggtgggtgaaagcatgataaagccgctgaaatattataataacaatctgtgtggtacggagatactgcttgagagtatggttgcacatggcgtggacaagattgtattttcttctacggcagcaacttatggagaaccggaacgcattccgattatggagacagaccgtacccttccgacaaattgttacggcgaaacaaagctgtctatggaaaaaatgttcaaatggacagcatctgcacatgatcttagatatgtttctttgagatattttaatgcctgtggtgctcatccaaatggaaagataggagaagcacataatccggaaacgcatcttattcctttgattctgcaggtgccgaacggaaagagagagtatatttccatctttggaaacgattatgatacgaaagatggtacttgtgtcagagattatattcatgtaaatgatctggcgcaggcacacattcttgctatgaaatatcttcgtgatggaaatgacagcaatatattcaatcttggtaatggagtgggatttactgtaaaagaggttgtagaaactgcaagaaaagtaaccggtcatccgattccggcaaaagaagaacctcgtcggtcaggagatccatctatgctgatcgcttccagtgcgaaagcaaaggaagtgttgggatggaatccacaatatgcagatttggaaacaattatagatacagcatggaactggcataaaaatcatcccaatggataccagaatgtgtaagggggggaagtgccatgataaatgagtgtatcaatgaacttgttgcgtatggattaaagaggggcttagttgatcctgcagatgaagtatatgtaacgaaccgtttattggaactgttccgtttaacggaacacgatggagtggtagaacaggttcagccgagaaaactgtcacagattttaaatgatatgttggaatacgcataccaacaggggatgctggaagaacagacagtcacagaaaaagatctgtttgatacaaagattatgggagaattaacgcctccaccatcggtagtccgcaggcagttttttgaaaagtataatatttcaccaaaaactgccacagatttttattatcaatttagccaggcaacaaattacattagaaccgaccggatcgcaaaagacgaaaaatgggcggcagatacagaattcagcgatttttggactgcatataaaaaaaggaccatttcacatttgtgaagtggtctgctttttcagtattcagttttcacaaatagtccttttagccggattatgcatgatatacatgctcaaagtatccttcatagaaggctaaaaggttgttcatataatttttgaatctgctcattttgtattcctcctttccttgtttgcaagttcattataggacaggctggataagaatgcttgccaaattaaaagaaaatgtagacaaatgttgcagaggaaatcaacaattaagtaataaaggggagatatatcaatgcatttgacgtttaaggaaacaaaggaagaggtatatgcggcgcaaagagtgtcaaaacatgtatctccacatttacataatgcattggagattgtgtgtgtaacggaaggaacacttgagatgggagtggggcaggaattatatcatatggaaaagggtgatatcggatttgtcttttctgatattattcatcattatcaagtgttttcagaaaaaacgagccgggcggattatatcttggttccgtcttcttttgcaggagtatttaaagataaaatacaaggatatgctcctaaatatccggttattcgtgcggggcagattgaaccagatgtttatcatgcaattcaggcgattatccaaatggaagaaaacgaacctatgattgttcaagcttatgttcaaattgtgctggcaagatgtataggaaaaatggaattggtggaaaaaagttgcgtggggagtgatgatttgatatacagaacagtatcttatgtgtcggggaattttaggaaaaaattttctctagaggagatggcacatgatcttggagtaagtaagtatgtcttgtcacgagtattttctaaaacatttcatcgtaatttcaatcagtatcttaatgatgccagattgagctatgcatgtacaagattggtaaataccagtgatacgatcctgaatatctgtctggacagcggttttgacagtcagagaacatttaacagagtgtttaaagaacgctataaaaccgcaccaagtgaatatcggaaaaacaaaagacgaaatgcgatatcttccggaagaataccgagaaaggttgatcggttatcttaggtgcctgcgggatgatatgaaaaaataataaaaatgtaaccttttgtttcaaattgctgtcataatatatagcgcgcaaaaaaaacttattgcagtaggaaggaagcaggaaaatgaaggaacaaaagaaaaaacggcacatagaagggatggatgcgttaaggggttttgctatattgggagttgtcctttaccatgtaatgccggggcggtttccgggcggctttctcggagtcaatatgtttttagtactgtccggatatctgatctataaaacatctgtatgggacctggaacatgggaaatatgcagcaggcagattttataaaaagcgttgcataaggatttatcctcctctgctcattatgatcattgcagtgtggggcattctggcggtcagtatgccggaggtggcaaagggcaagggcggtgaggttttaagcgttgttgggggatataataatttctggcagatccggcagaatgcatcttattttgcaaggatgagccagcagtcaccatacacacatctgtgggcgattgccatagaaatgcagttttatcttatgtggccgctgttgttttggcttcttcggaaactgaagaagcatacatccatgacggttgccagaacagctgtgcttgttctggtgattcttggtggacttcgtatgagcattgtctatcgtccgacagaggatgtatcaaggctttattatgggacagatacaagaatatatgccctgtttttgggaatgtttattgcaatgattcagaaggatgtgatatcctttgtacaaagaaggctgccgtcatggtttataaacagcctgacagcagcagggctcgtggtgatgacgggagcctatttcatagcggaagggcagatgccgtatatataccaagggggaatgtttgcagatgggatactttgtgcactgattcttttgctgattccggcgggaagtacgggggaatggctagacaaaagtccctttgccttagtaggaagaataagttatgagctttatctgtggatgtatccgatcatttttctgtttgggtattataagaaaaactttggtccggtatcctggtgtgtacagatgatactgatggtttttgcggcatctgcgatgcatggactgatggtattttttcaatataagaaaaaacagaacccgaaggggaatggtgttgtcataggttataccagtaccggattctctgtagcctgtattgtactggctgtctgtgtaatcactgcgtatcagctgccgggggaagctgcgaaggatactgccgtaaaagcacaggcaatggcacagcaacaacacaggagaatttctgacgagggaaaagcttcaaaagagaaagcaccggctgccggggaaacagaaaagataaaaaaggctcccttagagaaaacggatcaagatgacaatgccggcatccgtgggcagagtattaccgcaattggtgattccgttctgcttggtgcttccggggaagtaaagaaaaagctgccggactgtctgattgatgccaaggtatccagacaggttattcaggcgaaggatattgttaaagacctgaaatcaaaagggaaattaggagatacggtcgtgcttgcgctgggaacgaacggaaccttttcggatgctaccggcaaagagctgatccgtgcgattggaaaggatcggcagatttattgggtcacagccttcggggagcatttgcagtggcaggaagaggctaatcaccagatccgatccatggcagagcaataccaaaatgtgcagattattgactgggcatctcttgcagaagggcacccaaagtggtttgtatccgatggagtacatctgacctcttccggatgcaaagcctatgcaaaactatattatgatgcaatcgacaacaacagccggaaatgcattacaaagaatcaggaggagtagacctgcagtggcaaaaggaggaaaaaatggcagaatcatcatacaattcaaagggggaacaaatggcatgggatgaccgggagattattgcgcaatttctgtgccgtgatgaggctgccattaaaaatactgcggacaagtatgaaagatattgcagttccattgcctatcgtattttaggaaatggagaggatgtcagggagtgcttgaatgatacctggctgaagttgtgggagtccattccgccgacagtacctgagattttgtcggcatatgtgggcaaaataaccagaaatctggcaatcaaccgatatgatcatctgcatgccggaaaacgctgtggggacagtgtggatcagtcgttggaggaattaaaggagtgtgcatcgttggcgcatgataatgtgagagaggaaatggaccggagggatcttgaggaagcaatcaaccggtatctggacggactgccgtcaaaaaaacgacagatctttgtccgaaggtatttttatctggatgagatataccagattgcagagcattttcatatgacggagtccgcagtcaaggtgggattgcaccgtatgcggaagtccttaaagatacatttgcaaaaggaaggatatcatatttagaaacaagcctgtgaaaaaatcagggctgaattaagaaatgaggtaatagttatgtcaaagaaaaagatattgtgttatgttttattgactgcaatgttagtcagtatgtttgcggcaggagaggtgtctgtggcggcagaacaacagaagccggcatattccaatcttgcagatacaaagtcgcgaaaagaagtaaggagtgctcttttgtcagcggggatctccgccaaaacaacagatgcctggctgaaggatgtcgtaagctacaataaaaccatccaaaataccagtctggtaaaaaaaggcttcaaaaagatggggaaaaagccaccggtatataatgaaaaccggatcagtaagctctggctgaagaagaataaactgtttatcggttataactgcaggatcactgcctatgatctgatgaaggactatattaaggtcggcaataccggaaaagcgaatccgtcgcagctgtttatggatcaggatgcgttaaagaatgcaccaacgaagaagttttcaggaaagcagagaaaagcatttgagagtatattctctacggtgcagacgaaatatacgaagaatgtggcaacacatgcagcaatttgggcaaaggattggaaaaacaaaaagatttctgtttccggcaagacaaaggcaactctgatcagcgtcgttttgcattccagttttagcaaaacggaaaatgaactgtttgtgggtcataccggcgtgctggtgccgacaaagaatcataaatatctgtttattgaaaagctgtcattccaacttccttatcaggtaacccgttttgaaagcaaagaacagctgaatgattatctgatgggaatgtatgacacggaatgggggcaggatacggcaaagccatttattatggaaaatacaaagctgatgaaggaatatcatgcagtgtctgaccgatagaacggatagtaacgaattttcaaatgcatggaatggaggaatcagatgagccgaaggatcaaaaatacaatcagcagcaaggaactgctgcaggcaatgggaggaatacgggactgctatgtgaaggaggcagattatgctgcttgtgctgtcacgaagaaacaacctcacagatggtatgttgctgccggtatggcagccatgctagcattgagtattctccttccaaatcttaataaagcaacggcttatgccatgcagagtctgccggtgataggagaatactttaagctggttacattccgggaataccggtttgatgatggaaggcatagtgcagacgtaaaatggaataaaatctatgcagatagggcagggatggatgactccgaggaaaccggaaaacaggcgcacaaatcagtcaaagagatcaatgcgcagatggagcaaaagaccgagaagctgctcaaagaatttaagaagcaggtcggggcgttgggctactcctctctgaccgtggatagcaaggtggtcacgaactcttcgaaatattattgtgttatgctgtctgcgttctcctcccaggcagatggataccaggcggatgccttctatacgatagaaaagagtaccggaaacctgctggaattatcgaatctgttcccggagaatgcggattatgtagatgtacttacggcacagatcaagaaacagatgcgccaaaatatgaaaaaggatgaaaataatgtgtattttctggatacagatacaccagtagcattgtttgacaagattgatgaaaaccaacagttttatatcaatggaaaaggtgaaatagtgatctgctttgcagagggggatgtagcaccggcttccatgggaacacttcattttgttatcccacaaaaagtggtgaaagaacttcaaaaaaatgaatga

SEQ ID NO: 1119 - DNA, 23118 bp, unidentified
  source 1..23118: mol_type = unassigned DNA
ttcatagcagggaatcttctgcgactctccaactgacagtaagtttactctatccactgctaaaatactcattgcttttttcgttaagaaagcatataatgattaacagataacgaattgattatcgggagagttcctgctatataagtggagaatcttaaattctgagagagcagatagtaaaatatttgctctctttttgttttataccgaagaaaggaagtataatggaagaattcaaattgtacagtgtttcggatgaatatgtggaatggcttcgaggggatttcccgaatgtatattccaacaaagtgaatacaaggagctaagcagaaagcaatgaatgatatgactgctggatatgtgaaatcggcattggactacagggcattagaatacagatgtgatttatttgagcaaaagagtagcaggttatagaatttttagaaatccttcattttgctataattgttttctgacagataaggtgttatcataacattatcaagagaagccaatcaccacaggcgacatacagtgatgatccggagacgattttaccgcccccgcgctggcagaaagaaagaggcgcgtgtttatggaacaacatgatttaagtaagattcaaaaattacaggagaaaggaaaatccgacaagatcatcaaatatctgagttcttccgatgacacggtggtggtagccgcactggaagcgttgagccggatcaaggatgaagacagtgtcaacagcattgcccacatgatcgacaatccggatacgaagatccgtgtcgaagcagcaaaagcgttaggaagcatcggcaccgaatatgccaagacctatctgctgcacagactgaatgcagaacaggatgagaccgtgaagacagccatcaaggaagcacttcacaccctggcagagcatcattaatttgctttactcgtagtttttctacttatacattttccctcttattggcgtccgggtcattccgggcgcctttttttaccttttttattctgcgaaatttggaaaaatcttgcgatgggttctgcttgaagctacgacgcatatctatttataatagaacggtacgtgaaaaaagtagttttgtagtcatggaggtagtttaatggaaaaattaaacattacaactacaaaggataatgaaaaagtatacaaaatcctgggggatctgatgaatgccaacaaggaattccaaattatgatcacggttccttctacgaaaaacgccaaagacagcacagtaaaagcgacagaaaaaaaggaacagacccgggaagtcatccatgacctggaaaaggatgtcacggatatgatccatgagatcggagtgccggcacatatcaaagggtatcagtatctgcgggaagctatcatgatgtcggtagaggatccggcaatgatcagttctatcacaaagatcctgtatccgaccatcgccaagcggttccagaccacacccagccgcgtggagcgcgctattcgccatgccattgaggttgcctggagcagagggcgcatggagaccctggatgccatgttcggttacacgatcgacacgggcaaaggcaaacctaccaattcggaatttatcgcactgatcgctgacagaatccggctttcctacagatcatgagaaatttgaaacgaaaagttagatgaaaaagtaaatgatgactgaataatagcaataattactttgttttacttgtatggtgaaataagtaattattgctatttttatataaactaactatatggaaaaacaacgggattcaaaataaaagatattgataaatgaattttaaaatggtataatttgttaaaaagatgccacaaatgactaaagaaacaacgcttaacgaatttaacgattcaaacgctttaaacgaaatacatgaagtggaggaaaaaatgaagatatcgacagcagaaattaagatttatattattgaatgcgtaaaaacatatggcatgtatactaatgatgattttaaaaaatacataattcaaaaaagtgggaaaatacctacgaaaaatcaaattgccggagctattgcacaattagttgactcaaatgatatttcaagagttgggagaggcttatattctaaagatatagaaagtacatctgttaatacgaaagcatcttctaataatgctaaagaggatacattaaaagctgaaatttacaatactttgagtaaggtggaaaaagaattagtaagtgcaataggttcggttaatgtttttgatttaaatagtgaaaactttgagattataaagaagatacgtggattaaaagacactatagaagaaataaagggtcaatgtaaatagttgatgataattgtggaaaagagggaatatgcttcaggaaaatagtcgaacagaatttaaatcggaattaaatgacaaactggaaaaagaagttgtagcatttctgaacaataaagagggaggaatactctatatcggtttagatgatatagggagccctatcggtgtgccggaattagattctacgcaattgaaaatagcagatcgaataaaaaataatattcttccatcaactatgggattatttgatattgtaacagaggaaatagataatattccaatcattaaaattttgatttccagtggacttgaaaagccgtattatattaaaaaacaagggatgtcgccgaatggatgttttatgcggataggaacatctacgcaaccgatgccgacaccgctgatagacaattattacagtaaaaggcttcataatacattaagaaatatcacatcccccagacaggatctgacatttgcacaattaaaaatatattatcaggaaagaggaatggagttaaatgataaatttgtaaattcgctggaactcctgaccccggatggaaaatataattatgttgcatatttattagcagatgaaaacggcatatcagtaaaggtcgcaaaatatgcaggaaaagataaagtagatctgattgaaaatgaagaatatggttattgttctttgattaaagcaacctatcaagtgttggaaaaattaaagattgagaatgttacgagaacaaaagtgacaactgcgcagagaacagaaacaaatctggttgcacctattcctatgcgagaggctgtaataaatacaattgttcattctgattttacgagagagatccctccggtttttgaaatttttagtgacagaatgatttttacttcctatggaggattgataccgggacagagtgaagaggatttttttagctgtagcagcatgccaagaaatcgtgaattgatgagagtatttaaagatgtaggacttgtggaacagctagggtcaggaatgagcagaattctcaaagtatatgataagagcatctttcatatttcagagcattttattaaagtagagattccattttcaacagaacaaaaagaggataccaatatcattgccaatggcaatgatgttggcaatgatattggcaatgaaaagtcggaagaaatggaaactttggagatcctaaaagaaaatccatttgtcacagcaaaacaaatggcaaaacaaatgagcataagtccgagaaaggtagctcgtcttataaaggcactgaaagaagagggaaaaatagttagagtaggatcggatcgaaagggttactgggagattaaagatttgtaaattgcctttgaactcttttctatgaatcgtaaacatggtataatcaatctatattttgaatacaagccgtagcatatgtggagggtttacatgaaaaaaattctttttgccgcatcggaaggcgtaccttttatcaagaccggaggacttgcggatgtcgtaggatctttgccgaagtatattgacaaggagtattttgatgtaagagtgtttatcccgaagtatacctgtatgaagcaggagatgaaggataagctcaggtatgtgacacatttctacatggatttcaactggcagaatgtgtatgtaggtgttctggaggcagaggaagccggggtgcattattatttcattgataatgagagttatttcggtggtttcaagccttatggggatgatcccagatatgagatcgagaagtacgcatatttctgcaaggcagtgctgtcggcattaccgcttttgaatttccagccggatctgatccattgccatgactggcagaccggtctgatcccggtatacctgaaggagcgtttccatggtggagatttctaccgcaacatgaagtctgtgatcaccatacataacctgaaattccagggaaaatgggatgtgaagacggtacagagcattaccggactgccggagtattattttacctctgacaagctggaggcttataaggatgcgaacctgttaaagggcggtatcgtatttgcagatgcagtgaccaccgtaagtgatacctatgcggaggagatcaagactccgttttacggtgagggcctggacggattgctgcgtgcgagaagccatgatctgcgcggtattgtcaacggcatcgactatggagagttcaatccggagacggacaaaaatatcgtaaaagcctataatgcagtgaatttccgcaaggaaaaggtgaagaataagcgtgccctgcaggaagagcttggacttcgcgtagatgataagaaaatgatgatcggtctggtatccagactgacagaccagaagggtctggatctgatcgcttatgtcatggatgaactgtgtcaggatgatatccagttcgtggtactgggcaccggtgaggaacgttacgaaaatatgttccgtcatttcgactggaagtatggagacaaggtgtctgccaatatttattattcagatgcactgtcccataaaatctatgcggcttgtgacgcttacctgatgccgtctctgttcgaaccctgcggcctgagtcagttgatcgcactgcgttacggtaccgtacccatcgtcagagagaccggcggactgaaggataccgtacagccctataatgagtatgagagcaccggtacaggcttcagctttacgaattacaatgcacatgagatgctgaatacgatccgttatgcggagcatatttattacgacaggaagagagagtggaataagatcgtggatcgtgccatggccaccgactactcctggaaggtatccgccggaaaataccaggagatgtatgactggctgatcggataaagaactggaataaggtaagattacatatggcagataagaacagttccaagaacaattttatcatgcaggcgggaattctggcggcagccggaatcatcagcagaatcatagggctcctttacaggggccctttacagagtgtcatcgggaatctgggacttggttattaccagtcagcgtataactattatacgatcattctgttgatctcctcttatagtattccttcggcgatttccaaagctatcgcacagaagctgggagagaaggaataccgtaacgcccacagactgttccacggagccatgatctatgtactggtggttggcggtatagccagcctttttctgtttttcggagcgggattattcgtgtccggagcagcggtcacagtactgcgcacctttgcaccgacgatcttcgtctatggtatcctgggagttttacgagggtattttcaggcacataagagcatggcgcagacctccgtatcgcagatcctggagcagatcgccaatgcggtagtcagcgtaggcgcggcataccttctgatccaaatgtttatgggaacgatggaggttccggcggatcaggcagggcaggtgatgagagcaacctacggtgctgtgggaagtgcattgggaacaggtgtcggcgtattagtggctctgctttttatggcgggagtctatgctctgaatcgtggaatgatcctgcgcagagtgcagcgtgacaggcatgaacatgtggattcctacggacagatattcaagacgatcacactggtggtgacaccgtttattttgagtacggctgtatataacttaagcagtacggtcaacaacagtatctacacaaaatggtatccgtcccttcgcaatctggatacggtatctatttatgaaaaatatggtattttctccggacagtccttgacaatgtccaatattcccatagcctttgcatctgctatggcttctgccatgattccttccgtagcacagctgatggcagcccgggatgtgaagggagccagagagaagatcggtctggcggtgaagacgaccatggtgatctccattccctgtgcggtaggacttttcgtgctggcgaagccggtgatcagtctgctgttcacgaataagacggcagaggaattgaatctggcggcagctcttttaatgacattgtcactgtcggttatcttttatgcactgtcgactctgaacagttcgatcttacaggggcttggcaaagtaaataccccgatcatcaatgcggggatctcgctggtggtgcagacggtggcagcagtgctgcttctgatgttcacaagactggatctgtacagcattgccatcgctaatacgctgtattccggtatgatgtgtgtgctgaaccagtgggcggtaagaagagcggtaggctaccggcaggagatcgtaaagactttcgtcattccggcgttcgcctccgcgtttatgggagcggcagcctgggcaatctacgagggtctgtatatggtgacgaagtccatgcggatctctgtcattcctgcgatcgtaattgctgctgtagtctattttgtcatgctgatattgatgcggggcatcacggagcaggagcttcgaagcttcccgaagggatatctgttagtgaaggtagcgaagaagtgccgcttattgagataatgagaagcgatgacagctacgatgctctaggtgaagaaacagtgaagagaataagtacagaaaggagtctgcctcatgacaatgttattgtcggaggcagatttttgcgtacatggggcgtagatataaggagcatgctgattaagccccggggagatcgagagagcggggcgcagaaaggaaaagaaactaaataagccccggggagatcgagagagcggggcgcagagaggaaaagaaactaaataagccccggggagatcgagagagcggggcgcagagaggaaaagaagctgattaagcccccggggcatgaaaccacgggggcacaaagtcaaggtatatcatggaatagaaatgaaaaactttcaaatgtatcaattatctcttgcagaacggatccccaccattcttgaataatgtgatcatttcttgaccgacactgatagtggagggcagatccgggacatcctctctggagaaccaggcagcctcgccaagctccgattcctgcaaagtaatagaaggatccccctccagcttcgcgaagaagccgatcatggcggaatcgctgaaggaccagggctgggatttgtaatagaccagatcgctgacctttaaaccgacttcttccatgatttcccggcgggcagcacccttgaaggtctcaccgacttccacgaagccggccaccagtgcccagtgacgataggaaccgccggcgtagcgggtcagcaggatcttgtcctgttcggtatccacgatggcgataatgacggctggagagatcttgggatattcgatctgaccgcactccgggcagatgcaggcccgctctgtggtgctgtgaattgtgggatgtccgcagcggccgcagaatttccggtccagacggaaacgattgatctgggtggcagtgattccagcaaatgccagatattccggctcaaaattacggaacacaccggaagcgtagaggtcttcttccgggagcatgagagcaccggcatcctccgtcgtcttgcggaagaatgcccggtcatcaatggaaaagagatattcacagtccagaaaaaaacgttccataggctgacggattcccaagagtccatggacttcttcaaaagtaggaagatatacttgaggatgctccgagatgccggcatcggcggaagtatccgttacatcactgttttctgtatgggagggcagatagaccttttctccgtcaaataacagcagataatcggaaggtttaggctcctggcttcggaattccgggtaatatttatgcggttcgatcttatggatcatcatagagtatttctccttttatggctatttttcagaaagtgttcataagaatatagtagtccaccgtggggaaactgtcaaacgtaacagttcagccgcgccgttcacgggagtcgcgttaacacgcttttatgtcacttcgtgactacctttgctcatagattggcgcttagcgcctgcacatatttgcccgcaaaatcatgcaagcatgatttctgcgcccagatatgttcagaactgaactgttgtggaaattatttgagattccgggatatttgtgttaaaatattttgtgactgttctgaggtgttcatttctcgaatgcccctgtgaacagtcacggaatttatcagaaaatacagcatgagagtacaaaagtgagtatctcatgtggaaacgagggatagtatgttacagatgatcttgccggagggaagcagttctctccttgctttttttggaatcctttttgcttttggagcgacggtactggcaacggcgaaattaagtccgtatctgcccaaggatgcaggaagagaatttgcccatgacggaaaattgtctgcggggaaacccagaggtgccggaattatttttgtcatggcatttgtggcatccgttctgctgttttcccctttaagcgcagagctggtgatctatctgctgctgatcgtggtatgcatgatgacgggatttctggacgatgcttccaagactccctggggtgagtacaaaaaaggtttcttagatctgtgcgtggcggcactggtagccatcaccttcctgaaatacaactccaacgtggtggaactggcactgttccatgtaaagttcacgctgccgcctgtggtattcgccattctcacggtgatcctggtatggacatctgtgaatgtgaccaactgctccgacggtgtggacggactttccggaaccctgtcgatcattaccatcatgtccatctacattgtggatcgcatgaaggatgtgaatgagacttactctttcctgatcctgctgtttgccgtatgtattctgggctatctgtggtacaatgccacacccagtaagctgatgatgggggatgcgggttcccgggctatgggattgttcatcagcatcgctattttgaagagcggctgcccgttcctgttcatcccgctggcactggtgctgatcctggatggaggactgggacttcttaaggtgtctctgcttcgtttcctgaagatccatattttgaaaaatgtgcgtactcccttgcatgatcatgtgcgtaaggtgtgggactggtccaatacacagaccgtattccgttttgccattattcagatcattctgtctctggcggtaatctacgcaatgcagttgtagaatgctgggcacaccgggacagcatagagactgcgaccggtcatcctctgcaagaaaagaaggttggctgccggaaggaaaaaggtcggccgtcagaagaaaagaaaggcgtctgctgaaggaaaagaaggtcggtcgccgaagaaaaagaaggacggttgttggtagaaaatcagcatgtgccgagccgggagaaaaactgtcaataaatgatataagtaattgaacagatagaaatggagaaattatgtacgatgaattaacccccactgacattaagaaaatggaagatgagatcgagtatcgtaagctggtggtgcgtcccaaggcactggaggacgtgaaggaagccagagcccacggagatctcagtgagaattttgaatattatgcagcgaaaaaatacaagaatcagaacgagagccggatccgttatctggagagaatgatcaagaccgcaaaggtgatctccgagaactccgccgtggatgaggtgggcatcaacaacactgttaccgtggaattcatcgacgacggcacggaagaggattacaagatcgtgaccaccgttcgcggaaactcactggaaggtctgatcagcaacgaatctccgctgggcaaggcactgcttggcaaaaaagtgggggatgtggtccatgtgcaggtcaatgccaatgtgggctatgacgtagagatcaaggcactgaaaaacactgaggatgacggggacaagatccgcagcttctaatgctttgcggaccccacaagctatagaaagaaagggtaactattcagagcctcataacaattacagaatattcttgcggatcccggtatccaatgaatattttgcgatagttacagggcttggaacagatacaaaaaaaggaattataagaatgaaaaaatatctgctgtttgatctggacggtacactgacagatcccaaaattggaattacgacctgcgtgcagtatgcgctgcactctttcggtattgaggaacctgatctggacaagctggagccttttatcggaccgcccttacgggacagctttatggaattctacggttttaccgctgagcaggcggaggaggccgtggcaaaatacagagagcgttttcagaatacgggtatttttgaaaatgaagtttatgccggtattccggagatgctgaagaacctgcaatccaagggctattttctggcactggcttccagcaaaccccagatctatgtagaacgcatactggagcattttgatctgaaaaaatattttgccgtggtggtaggcagtgagctggacggcaccagagagacgaaggatcaggtggtgcaggagaccctgcatcagctgttcaaggagaatcccatagagccggatcaggtctacatgatcggtgacagaaagttcgatgtggaaggagccagagcgttgggcgtggagagcgtgggcgtgacttatggctacggaagcaaggaagagttaaaggaagcaaaagcggactacatcgtacaatccgtggaagaattggaaaaatttctgcttcgcggcagcgaggaactggtgaacagcaatcccgacaataaaaagaaaaatcccatgtaccagagaatctggaccatggtgtattcgttcctgatgtttatcctggtgcgcaatgtggtacagtatgcgctgctggcactgttgtatcagctggcacagtccggtgcttccggtggactggtagatctgctgatcctgagggatgagaccggtgcatataacggctattccggagatgtgtccagtatcatagcggcactgggcttcatcggcggagcactggcggtatggtccacggcaaagcttctgatcacgaagaacaaagaggatatgcatttaagccatctaaaaaaagaaggtaaggcaaaatatgccctgctggtggcaaccactattggtgccgttatcggatgcaacctcctgtttgaactcctgggagtgaccaacaaatccgaagcctataccgaagttgcaacccagcaatattccgcacactttattgtgggtattctggtattcggctttatctctccgattgcggaggaattactgttccgtggagtgatttatggttacctgcgcagatttatggatctgaagcttgctatagctctgtccgcactgatcttcggtgtgtaccacatgaactacgtgcagggcatctacggctttctcattggctgcctcatggcttacgcttatgagtatttcggagaattcaaaatggcagtgttcgttcatgtgtcatccaatgtcctcgcctactgcctgtcctacacctccatcgccgtcaccggcttcgtcagctggcccgtgtgcgtggtattcctggcagtggcagttgtatccttgatcactttgcacaaacagaaaaatatattttaatgagataacaaaacacattagttaccagttctgaccgcattcataaactgtattgaactggacttcataacccagcagccgaaaacagggtaaggataagcaggccgtaagcagacgtcggcacttagtgaccgtactttggtcacttatgtgccgctacgctctgcgacagagtgcgaacgtgccgcgttccttgccctgttctcgactgcggagatattacatcttaaaaggagcaacatatgaaattcagcattatcgtagtatgcctgaaccccggcaccaaactgaatcagacccttgacagtatcctggcccagacctgtccagacttcgaagtcatcgtcaaggacggtggcagccgtgacggatccatagagtccatgcgcactgacgggcggatccatctctaccaggaaccggatcacagcatctacgaggctatgaaccaggcggtctctcatgtgaccggagattacattctgttcttaaactgcggtgacctcttctatgacaaggaagttctggcacacaccgcacaattcatggaacagcaccctatgaaactgcaaggcatctattacggagatacctacagcgcgaaaacggacacgaagatatcatccccgccccgaatcaccggctttgtctgctaccgcaacattccctgccatcagtcctgcttctatgccgcagacctgtgccgacagaagccctacgaaccaaaatacaagatccgcgcagattatgaacattttctgtggtgctattaccgggcgaaggctcccatgcagtatctggggcttaccgtatcttcctacgaaggcggcggctactccgagacaaaggagaacctgaaacgcagtgccgcagagcataaggagatcacggcaaaatacatgaaacccgtagaactgttccgttaccgcgctgtgatggcactgaccctggcacctctccggaccgcaatggcagaaagcagacatttctctgcaatctatcagggactggcaagcaaagtgtatggtcggagacaggaaaaatagggaaaatccccaaagagttgtgctaaaagcatggcttaaaaaagaaaattagaacaattcacagacaacagccgtgtgaataactgaattgacaaattatctgacaattcaaggaaaaatctatatttacaaatgagaaaaataggtgtatagtacagaaaaggtcgcaatgaggcgctcgaaagagtctcattgcgaccttttttagttgcaggaaagtgctgaaagcacagtcttgcgaatgaggttctgaataggaacagacagattaagaagagagaaatagaaaaccggaaaggagaactatatgtttgatgtaaaacaggagctgcccaaggcaccgttatatcgggaagaatttgagcatgataactgcggtatcggagcctgtgtcaatattcacggagagaagagccgcgcgaccgtagagaatgcgctgaagatcgtagagaatctggagcacagagccggtaaggatgcggaaggcaagaccggtgacggtgtcggtattctgacccagatcccccacaaattttttgcaagagtcacaaaggctctgggcatggatatcggcggagagagagaatacggtgtcggcatgttcttcttcccgcaggaagagctgcgccgcaatcaagccaagaagatgttcgagatcattgtggaaaaagaaggaatggaattcctcggctggcgtgaagtgcctaccttccccaatgtgctgggacataaggccgtagagtgcatgccctatatcatgcagggattcgtgaaaaagcctgccgatgtggaaaaaggactgccctttgaccgcagactttatattgcaagacgtgtcttcgagcagtcttccgatgatacctatgtagtttctctttccagcagaacgatcgtatataaaggaatgttcctggtaggccagctgcgtaccttcttcgcagatttgcagagtgaagattacgaatccgccattgccatggtacactcccgtttctccaccaataccaatcccagctgggaacgtgctcatccgaaccgtctgatggtacacaacggtgagattaacactatccgcggcaatgccgacaagatgctggccagggaggagaacatggaatccgagcatctgaaaggccagctgcacaaagtactgcctgccatcagcaagaccggttccgactccgctatgctggacaacacgctggaattcctggtaatgagcggcatggaactgcctctggcggtcatgatcgctatccccgagccctgggcgaacaacaaggccatgtcccagaccaagagagatttctaccagtattacgctaccatgatggagccctgggacggccccgcatccatcctgttctccgacggagatatcatgggtgcggtactggacagaaacggcctgcgtccttcccgttatctgatcactgacgatgataccttgatcctgtcttccgaggtaggtgtccttcctgttgatcccacgaagatcaagttaaaggaaagacttcgtcccggcaagatgctcctggtcgataccgtacagggcagagtcattgacgatgaggagatcaaggaaaaatatgcttccagacagccctatggtgaatggctggacaacaacctgacagaattgaagagtattcacatcccgaaccagcgtgtccctgagtacacctacgaagagcgtcagcggatgcagaaagctttcggttatacctacgatgagatgaaacagagcattctgcctatggcaaagaacggcagtgaagcgattgccgccatgggtgtggatacgccgcttcccgtcttaagcaagacgaaccacccgctgtttcattatttcaagcagctgtttgcacaggtaaccaacccgcccatcgatgcgatccgtgaggagatcgtgacttccaccaccgtatacatcggtaccgagggcaacattctggaggagaccccgaagaactgtaatgttctgaaggtcaacaacccgatcctgaccaacacggatctgttgaagatcaagaacatgaaggtagacggattcaaagtagaagtcgtacctatcgtatattacaagaacaccagcttagagcgtgccattgacagactgttcgtggaagtggacagagcttacagagacggcgtgaacatcctgatcctgtccgacagaggcgtggatgagaaccatgtgcccattccttccctgcttgccgtatccgccctgaaccagtatctggtacgcaccaagaagagaaccagagtcgcactgatcctggagtccggcgaacctagagaagtacaccattttgctacactgctcggttatggtgcctgtgctatcaacccttatctggcacaggataccattaaggagctgatcgagagcaatatgctggataaggattactatgcagcagtggatgattacaacaatgctgtcctccacggcatcgtcaagatcgcatccaagatgggtatcagcaccatccagtcctatcagggttcccagatcttcgaggctatcggtattgcaccggaagtgatcagtaagtatttctccaacaccgtatgtcgtgtgggaggtattaccttaaaagatattgagcagcaggtagacgacctgcactctcaggcatttgatcctctgggactgaaaaacgatctgaccttaaacagccccggacatcacaagatgcgcagcggcggtgacgagcatctgtacaatcccgctaccatccatatgttacaggaatccaccagatgcggtgattaccagatgttcaagcagtacactgccatggtaaacgacgaagattccatcaagaatctcagaggactgatggacttcaattatccgaaaaagggtgtgcctattgaggaagtagagccggtagagtccattgtgaccagattcaagaccggtgccatgtcctacggttccatatccaaggaggctcatgagaccatggccatcgccatgaatcatctgcacggtaagagcaattccggtgaaggcggtgaggacctggatcgtctgaccgtcggaccggacggactgaaccgttgttccgcaatcaagcaggtagccagtggacgttttggtgttaccagccgttacctggtaagtgcacaggagattcagatcaagatggcacagggagcaaaacccggcgagggcggacatctgcccggaggaaaggtatatccctggatcgccaagaccagacactccacccccggtgtgtccctgatctctccgccccctcatcacgacatttattccattgaggatctggcgcagctgatctatgatctgaaaaatgccaacacccaggcaagaatctccgtaaaactggtatctgaagccggtgtgggaaccgtagcagccggtgtagccaaggcgggagcccaggtcatcctggtatccggctatgacggcggtaccggtgcggcaccgagaaactccatccacaatgccggacttccctgggagctgggactggcagagacccatcagaccctgatcatgaacggcctgcgtaataaagtccgcatcgagaccgacggtaagctgatgagcggcagagacgtagccatcgcagccattttaggtgccgaggagttcggttttgccaccgcaccccttgtgaccatgggctgtgtcatgatgagagtatgtaatctggatacctgtccggtaggtgtggctacccagaacccggagttacggaaaaacttccgcggtaagccggaatacgtggaaaactttatgaaatttatcgcacaggagctgcgggaatacatggcagccctgggcgtgcgtaccgtagatgaactggtgggcagaaccgatctgctgaagagaaaagagcatctgaacgagcgtcaggaggaagtggatctgacccagatcttaagcaacccttacgaaggcagcaagcagaaggtgacctttgatcccaggcaggtctatgacttccagttagagaagacactggatgagaaggtgctgttaaagcaactgggcaaagctattgatgcgggacagaagcgcagcattgaagtggatgtcagcaacaccgaccgtgccttcggtacgatcctcggaagtgagatcaccagaaaactgggcgatgatgtggaagaggatacctaccatgtactgtgcaagggtgccggtggacagtccttcggagccttcattcccaagggtctgaccctggaactggtaggtgacagcaacgactacttcggcaagggcttatccggtggtaagctggtggtatatcctccccagggtagcaagttcaaggcggaggaaaacatcatcatcggtaacgtggcactgtacggtgcgacctccggtaaagcattcatcaacggtgtggcaggcgaacgtttctgcgtgcgtaactcaggtgccatcgcagttgtcgaaggtgtaggtgatcatggttgtgaatacatgaccggcggacgtgtggtagtcttaggacccaccggaaaaaactttgcagccggtatgagcggcggtatcgcttatgtactggatgaaggcaacgatctgtacaagcgtctgaataaggaaatggtatcctccagcgagatcacatccaaatatgatgtgctggagttgaaatccatgatccaggagcatgtggcactgaccaattccgccaagggtaaggaagtgctggacaactttggagagtatctgcccaagttcaagaagatcatccctcatgattatgagagagtcttaaagaccatcgtccagatggaggaaaaaggactgagcgcagagcaggcacagatcgaagcattctatgccaacaccagaaagtaggaggccagtgtgaaaagtaatcttgatagattgcttttcacacgactaatttgtgccgcgggcgccacaaattagtttatcgcagaactaaatatgaaatttagttcgcgattcttccgacgccgaagcgtctgcagaatggagagagtcatgggaaaaccaacgggatttatggaatataaaagggaagtcagcgtggctgaggatccgaagaagagaatacagcattttaatgaattccatgagcatctgccgaaggaaaagcagcgtttacagggtgccagatgtatggaatgcggtgtgccgttctgtcagtcgggcatgatgatctgcggtatggccagcggatgccccctgcacaatctggtgccggagtggaacgacctggtatataccggcaactggcagcaggcttacaaccgcctgaagaagaccaacaatttccccgagttcacttccagagtatgccctgccttgtgtgaagcggcatgtacctgcgggttgaacggggatccggtctccaccaaggagaacgaatatgcaattattgaaaacgcctacagcgagggttatgcggcagccaagccccctgtggtgcgtaccggcaaaaaggtggcagtcatcggcagcggtccttccggactggcagcggcggatctgctgaaccagagaggacatcaggtcacagtatttgagcgctccgaccgtgtgggaggactgttaatgtacggcatccccaacatgaagctggagaaacagatcattgaccgtaagatagccatcatgaagaaagagggcgtcacctttgtcaccggtacggatatcggtaaggacatcaaggcatccaagctgttacatgattttgaccgtgtcgtactggcctgtggtgcttccaatcccagagacatcaatgcgccaggcagagatgccaggggaatctatttcgcggtggattttctgaaagccaataccaagagcctgctggattcgaactttgaagataaaaaatatgtggagaccaagggtaagaacgtggtcatcatcggcggtggtgataccggtaatgactgtgtgggaacttccatccgtcacggtgccaagtctgtgacccagatcgagatgatgcccaaggctccggacaagagagcagagaacaatccctggcccgaatggccgaaggtctgcaagaccgattacggtcaggaagaagccattgcagtctacggacaggatccgagaatctatgaatctacggtcaaggaatttatcaaggataagaacggcaacctgaaagccgtgaagatcgtgaagctgtcctgggaaaaggatccggctaccggacgcatgaagatgcaggagatcgccggaagtgagcagatcctggatgcggagatcgtactgatcgcagcaggatttttgggaagtcagaaatatattaccgatgctttcggggtggaattaaatgaacgcaccaacgtaaaaactgcccccggcaaataccagaccagtgtggaaaatgtattcgttaccggtgatatgcacagaggacagtccctggtggtgtgggcgatccgtgaaggcagagaagccgcacatgctgtggatgagagcctgatgggctactctaatctggtgatccagtagaggtattattctcgtagatggatctcagacctttcataagaagattctgatcgatatggatcttcgtttcacaatgtggaatgacggtcgttgcgtaccctccggtggcaacgaccgttgctttttgccctaactctgtctggatacggcggatcagtccgtcgatggcacaggcgttgcccaagagcattcccccggtgatgcattcctgcgtattcgcaccgatggtgtgggcgggcatatgaatgtcccctttcgggagctgggcggtcttgcctaaaagtgccctgtgggcggttccaacaccgggaaggatcaggccacctaaaaagcgacggttctcatccaacacgttaaaagtcgtggcggtgcccaggtcgatggtgacgaaaggcagggaatagcgggaaatggctcctgcaatatctgccagtcggtcacagcccaccttttccgggaattccgtacagatctcgtagcccagatccagcttatgggaaagaatcagaggtttccgtcccagaaaagtttccagagcagaggaaaaaacggctgtcaccgaaggcacaaccgaggaaatcatagatccctcaaaggcctcggcagacaggccgtgtttgttcaagatcatattcagtttttcaatatatccagcatcagacaggggacgacgggacgatatcttctcaataaagagcagcttatttccctgaaatcccccgatgccgatcgtagtatttccgatgtcgattgtcagtaccacgggtatactcctgttatgctgcagaccctgctttctgatatacaggaatgacttttgccttgatcagtgccagccctaccgctccggtcaggaacgtggatgcacacatctcgaagaccgcattcacacctacaaaagagcagatgaataaaatcgcgtttttaccacccatcagtccctgcacataggaagtattgccgaacagcagtactaaaagggacatgaaaaatgcggtgttgaaaaatgcgctgcaaaatccggtgatcatgcaggcgattctgtctcctacggctttgcggctgtaacggaagacatatcccagcagaaatccgtccagaagtctggggatgaaacgctggatgaaggccaacacagggttgatgccaaaaagcattgctcccatggcgctggtgcctcccacgccgatgcattgcaaaaagctggtcaatccgaatactgctcccatggcggctccgcctacagggccaagagtgattgcagccagtgcaacggggatgacattgaaggtgattgccagggggccgatgttcaggtacccgagcggggtataagccatcagcaaaagtaccgcagcaaacaatcccatcaacgtgagtcgcattgtcttactttgtttgttcatatgaaattttcctccttgttaccattctccctctgggagatacaatacaagctgccccggtgattcgggacactcctactgtttatatcatatcccggacaaaaagaaaagtgatatttgcataaaatatgcacttatggtattttaggagtacagttttgaagtatttttgataaatcaggcaaaaggagacgactatgctgaagggaaagaccgcagttctggcaatctcgggaagtattgctgcatataaaatggccaatgtagcgcggatgctgttaaaacagcactgtgatgtggaagtgctgatgacacagaatgccacgcagttcatcaaccccattacttttgaaagtctgacgggacataaatgtctggtggacacctttgaccgcaatttccagtacagtgtggaacatgtggcactggcaaagcgggcggatgtggttctggtggcaccggcttctgccaatgtgatcggcaagattgcaaacggcatcgcagatgatatgttgaccactacggtcatggcatgtccctgcaagaagattgtgtcccctgccatgaatcataatatgtatcacaaccccatcgtgcaggataatatcgaaaaattaaagcatttcggctatgagatcatcactccggccacgggaatgctggccaacggcgatatcggtgacggcagaatgccggaggagtccgtactgttcgaagccgtggtgaaggagatcgcctgcgagaaggatctggcgggcaaaaaggtgctgatctccgcaggtgccaccagagaacccattgacccggtgcgttttatcacgaatcactccagtggaaaaatgggttatgccctggcgagagctgcaatgcaccgcggcgcagaagtgacggtggtggcagcccatacggatgtggagccgccgttgtttgtaaatgtggtgccggtacagacggcagcagagatgtacgatgcaatcgtgtccagagcgcaggactatgattttgtcatcaaggcagcagccgtggcagactacaccccggcagtgacagcagacaataagattaagaaaaaagacggagacatgtcgatccctctggtgcggacgaaggatattttgaagacccttggggaaaacaagagaccgggacagattttgtgtggattttccatggagacggaaaatgtactggagaattcccggaagaagctggagagcaagcactgtgacatgatctgtgccaacagtttgaagagcgcaggagcgggctttggcacggacaccaatattgtgacactgatcacaaagaattccgaggagagcctggaactgatgagcaaggaacaggtggcacataagattctggataaactaatggcaatatgactctgtattaagtaattgcataatataggcatttgcaagatggcccaaaagatattgtaaacatttgaagaaatatcttttgggctattttcaagatatggatatataaaaataaatttgtagggataaaagcttgtaaaacttcgcagaaacgaatagaatagatttacaaaagggagtgataaaattggaaaaatatatatctgtaatagaattggcagagagatggaatgtttcgcctagaagaattcaagtattatgtaatgagaacagaattattggagcaaaaaagcaaagtggagtatggcttatcccctatgaggcaaaaaagccagagaaaatgaaatctggaataaaaaaggaaaagaaggaaaccttgaatgtattatccctgttctcaggttgtggaggaatggatttggggtttgagggtggtttttcagtgttaaagcaatcagtaaatattgatttgcataaagagtggaaaataaaaagggaaaatagtaattgggttaaattgcctaaaaatagatttcatactgtatttgcaaatgatataaaaccggaggcaaaagcagcgtggtgtaactattttggaaacagaggagtggatgaaacatgttactatttagacagtattgttgatttggttaaacttcaaaaagaaaataaaataaatatttttcctacagatattgatattgtaacag

SEQ ID NO: 1120 - DNA, 31291 bp, unidentified
  source 1..31291: mol_type = unassigned DNA
ctcgtccagcatagcgtcaatgtccgcctcgctgtcagccgttgtgggcagcgcggtcaggttgcgccagcttgtgtggatatagataatatccgggtggaactcgtccagctccggcgtgccgaacatggcgtcctgccagtattgggcgtattcactttggtaaaattccgcctcgatgccgtactgcagcagaaacagccccagctggtcggccacctcgttggtggtagaaccgccgaggatggcgatttttttgtgcagcgggtgcgggttctgggccagcagctcgcggcgcagtctgcgctttttgcgcagcagggtctcggtatcaagcggatactggaagcagtccatgggaagctcctttactatatagatagcatcaaaaaggcttccccttgggggaagctgtcaccgaaggtgactgatgaggggcgcgtctgccctgccgccctcttaccggcaatagcggcagtgctttccctcatccggcgctctgcgccgccttttcctgagggggaaggctttttactgcatctccgccagcgcgctcttgagcgcctgagcgatctggtcggggcagctggtgggcttgcggccgcagatcgtgccctccatgcgggcgatggcatcctcggccttcatgccgggcagcagcttggcgatgcccttcaggttgccgtcacagccgcccatgatctgaacgctcttgatggtgtggtcatcgttcagctcaacgatggtgcggacggaacaggtgcctttattattgtaggtgtatgtcatgatattgctccttactctgatttttttcgtgttgccttgcgcgccttggcaatatcgccgatgcgcgcgatcatctcatcccgggtagaaaatgcgcccacagggcggggtgtcacggtgttcaggccgtggtagtcggtgccgccggtgatgatgagcccgttttcctgcgctagacggatcagctctgccttatcctccggcgtgttgcgggggtggtcgatctccacgccgtccaaccgcccggcggcgatcagctccctcgcaagctccatgctgtgatagacgctggggtgtgccagcacgaccactgcgcggcttgccttgatgacatccagcaccgtgtcaaccggctcataccgcggcgtgtgcaggatgcgcccgcgcacaggcttcagcccgaacagcgacttatagacggtattgtacatgccgtccgccaagccgtactgccacagcacccgcatgacatgggccttgaacagcgtaccgctgtccttagcaagggcgagcgcctcctcggtgcgaaactgcgggcagattgcctccagctccttgcagctctgcagcatggcggtcagacggcgctccgccatcatggcggaaaagtccgccagtgcggcgcagtcgtccggccaatagcagagcagatgcacgcggtgggcgcgctcatagtcgtaggcggtcagctcggtggccgggatgaggtggacgccgttttgcagcgggtggtcgtgggcatagcgcacactctcgatcgagtcatggtcggagattgccagatgcgtcattcctgcacaggccgccagaaacggcagcttgtccgccggggtagagccatcggaaaatgtcgtatgcgtatgcagatcaccgggcataagcgtcacctcacttgcgaatgtggatactatgggacatactattatactacaagtcgagggagaattgcaagtaggggcgagcaatgcccgcccctacagtttccgttttattttcgctcttttttaagacaggctgcggcccgacacgcagacggtgcgggcatcaaatttcaatttttcgtcaccgttgtagacattgaatacatattcctgtacacccggccactcggcaaacagatacgcaccctctcgtgtaaagctccagacgccgggatcatcgctttcgaggctttccggagcggtgaagcccggtatggcggctgtctttggttccgaaaaatccagcgcgttcagttcgtcataggtcagaaagaacggcaggcggttccagtccgttgtatcgctgaaatccgtattcagcatcagcagggcgtccgcctgaccgctgtaataccggttgcgatagtagagataggtttccaactcatcccgcggccagtcgccggggttgctaaaatcccgcgcacccgcctgtgcaagcgtgttgcactggtgcagcagcatgcggtactggttgttggtcagatccaactcccgcgccatgggcaggatctcaaaatgagccgattgattcggatcgtcggccgactgccagccgctgatgacctcacagggctgcgcttcatcgaacggcacaatcagataaacatggaaacgcccctctccatattgcggccccctataccatgcctcgggcgaaagttcgacttcaaaggttgcctttaccagcgcgccctgaccctcgttcaggtagtcacgccagttcgtgccgtccgtgcgcggtgcatccagcagagcggccatttcctcgctgtcgtaatctgcaggctctacaaggccgcatgcgccgctgtggtagtagtaaccgtttccgtcggtcagatattcactccaaaggaagtccgaaccgcggcgaacggcggtggcccccgcctccaccgaaacaggcggcggttccggtgtcacaacgggggtgtccgtttcggacggtgccgacacggcggctgttggttcctccgggagcggttccaccgtcttgcaggccaccatactgcccgcgcagcaggcggtcagggccagcacagccagtttggtccacagccggcagaaacactgcgggccgtaccgcttttgcagcctgagcgcggcggccagcaacgccagcacggccagactgagcagcagtccttgtgttaaacaggcgataaagacagcttgatacataggtaagccccctttttattctacagatgtagaggatagttttatcctacaagtgtagaatttcattgtcaagtggcgtaggtgacgaattttgcggggagtttttagggaaagtgcgcagtggcggagagccgccaaagcccctcaggcctcgcaagctcggccagctcccctgaaaggggcgcctttttacgcgggcagtgcccgcgaggatgcctccccattctggggaggtggtcgagcgccagcgatgaccggaggggcttttcccgtttgccgtcaggataaacaaaaagacgcaccgcatccaaaagcggacacggtgcgtttgcttatgctatgctaaattttacgccagcagcggcttgcaggcctcggccagcttttccttctgggcttcggcctcggcgaggtccttgcccttggtggtaaagtaggtcttgatcttcggctcggtgccggaggggcgcacaacgaccgttgcgccgctttccagcgtgtaaatcaggacgttggcggcgggcaggccggtctcctcgggctttttgtagtccacgaccttgacgaccttgtcaccggcaaagtccttcggcgggttggcgcgcaggctggccatgatttcggccatcttgtccatgccggacaggcccgggaactcaaagctgtccaccttgttcaggtagcggccatactcggcgtagatgcgctccagctcttccttgatggaggagcccttggcgcggtagtaggcggccatctcgcagatcagcatcgagccgatgatggcgtccttatcgcggacataggggccggccagatagccgtagctttcctcaaagccgaagataaagcggtcaatctcaccgtcagcctccagcttggcgatctggtcgccgatccatttaaagccggtcagcacattgcggcactcgacaccgtaatgctcggctaccttgtcggccagcggggtcgagacgatggatttgcacatgacgggattcttcggcatggtgccctgctcgatgcggcctgcgcagatgtagtcaagcagcagaacgccaacctcattgccggagagcagctcatagctgccgtccttgcacttgacggcgatgcccacgcggtcggcatcggggtcggtggccagcatcagatccgcaccggacttttcggccagctcaaggccgaggcgcagagcctcaaatatctcggggttggggtacgggcaggtcgggaagttgccgtccgggtccttctgctcgggcacgatggtgatgtcggtgatgccgatgtcccccagaacatgggtgacaggcacgaggccggagccgttcagcgggctgtagaccagcttgaggccggcagtcttgcagatacccgggcggatggagcgtgcctcgatggcggcgtagagggcgttgatgcaatcctcgccgacatactcgatcaggccctgcgccatgccgtcctcaaaggaaatcagcttggcaccggtcaggatgtcggttttctgaatttcggcgtagacgatgtcagcggcctcatcggtcatctggcagccgtccgggccgtaggccttgtagccgttgtacttggccgggttatggctggctgtgaccatgatgcccgcgttgcagttgtagtagcgggtggcaaagctcagcgcgggaacaggcatcagggccttatagatgcggactttaatgccgtttgcggccagcacctcagcggctgttttggcaaagaggtcgctcttgatacggctgtcatagctgatggcaacggtctggctgccgccctgcgtcttgacccagttggcaaggccctgggtcgcctgacggacaacataaatattcatgcggttggtgccagcgccgatgacgccgcgcagaccggcggtgccgaacttcagggccacggcaaagcggtcctgaatggcggcatcgtcacccttaacgctttccagctcgggcttgaggtctgcgtcatccagctcggcagccagccaacggtcatacatttctttatacataggtaatgcacctgctctttcgcaatatttaccgcataatttgtggtagcttatactaaatataccaactttgcccgtgtgtgtcaatcgaattttggctatttttgcccattctttacgaatcttttttacatcgtaaacccttgcaaaacaacaggttcaagtgtatattgattagtagtatatatgtaaaagtgggattgactatgaaaaacacttccgaattgatcgttatgctgacgtataatgactgtacggtgcccaatgcagctgagatttttgagcagtgcaaggaaacccgcgcccgcttttggggttttaaggagcagggaatttcctttgctgagatgcaggcgctgtttgcccgcatgaaggcctgcggtaaaaccacctgtctggaagtggtttcctacacggaggaagaatgtctgcgcggggcgcaaacagccgcagcctgcggctgtgattatctgatgggcacactgtattttgactcggtcaatgctctttgccgcaaaaacggtgtgcgctacatgccctttgtggggcaggtgacgggtcggccttcggtactgcatggcacagcggaagaaatgattcttgaggcgcagcgctgtcttgccaagggcgcttacggcattgatcttttgggttaccgctacacaggtgacggcgcggcgctcaaccgtgcgttcaccgccgccgtgcccggccccgtttgcattgcgggcagcgtcaacagctatgcgcgactggaagaactgcgccaaacagcccctgccttttttaccatcggcagtgccttttttgaccacgctttcgggcaggacattccggcacaaatcgatgcggtctgtcgttttatggaggcaggacatgcttgaaatgttgtatccgtcagcgtatatgcccgatgttttttccatcgattaccccaagctgcaagctctgggctatcagggcgtcctgtttgatatcgacaatacccttgttcaccatggggacgatgccacgccggaaatcgagcatctttttgcctacctgaacagccttgggctgaaaattctgctgttctcggacaattcacggcagcgtgtcgaacggttcaaccgaaatatcggcgtgccgtttctggctgaggccggcaagcccgatcccgccgcctgccgtaaagctgcctccatgctgggtctggcggaatcgcaggtcatctgcgtgggggatcagattttcaaggatattctcggtgctaaccgctgcgggatggcaagcattctggtggattttatccgcctaccggacgaaaaacatttcggcaaacgccgcgccgctgagaagatcattctgtggttttaccgaaaaaaccggcgctgttacaaccgtctggccattgcccgctaaggagagcacactatgttttgtgatatcaacccgacctgctataaaatcgcgctgcaaaaggaaatctgcaagcgccatatcaagaattttttcgcgcaggaaaactatgccgacacgcaggataccgcgcctctgccctgcatagtggcgcagtacagttcgcacctcatcaagcgcggcaagggcatcgacccagtcttgcaggagaacaaggccgtcaacatccgccttgccaatgaaaggctcaacggcattctcatccgcccgggtgagacgttttccttctggcatcgggtgggcaagacgaccaagcgcaagggctaccgggatgggcggattttggtgcgtaatcatattctgccgggcatcggcggtgggctgtgcaacctggcaaacacgattcaccgcgttgtgctggtaagccctctgaccgtgaccgagtttcacaagcactccgatgcgctggcccccgacgaggggccgcgggtgccgttcagttccggcacgtcggtgttttacaataacggcgactaccgttttaaaaatgagacggaccagacgttccagctgctgttgtggtgcgatgaggacaacctctacgccgagctgcgctgtgagcgccccctgccctgccgctaccgcattgtggaggaagggcaccacttccaaaaagagggcggcaaatattaccgtgtgtcgaagatttacaaggagacactggacgcacagaccgggcagctgctgcaccgggagcttgtgctggacaaccattccgaagtcatgtatgaccccgcgctgattcccggcgtggaaaaactgtaaagggagccgcctatgtatgcaaaagtgacaagccttggtgtgaccgggctggcggggtatcttgtgcaggtcgaggctgatcttgcgggcgggctgccgcagttcaatctggtcggcctgccggactccgccgtcaaggagagcagcgagcgggtacgcagcgccgtgaaaaacctgcactatgcgtggcctgccagccgcatcacgatcaatttggcccccgccgatgtgcgcaagaccgggccggtatatgacctgccggtatttgtgggcatactggctgcgcagggcaagctgcccgcgcccggcggtgagcgggcgtttctgggtgagctggggctggacggcacgctgcgccccgtgaccggcgtgctgccaatggcgctggccgcggtgcaaaacggcgtgaaggagctgtttctgcctgccgaaaacgccgccgaagctgctgtggccgaagggctgactgtgtaccccgcgcgcagtgcgcaggatgttgtgctgcacctctgcggcgcggaacccatcacccccgccgcacccgatgggtacgatgaaaacggcgtctggctcgggcctgacatggccgatgtgcgcgggcaaagcgaggcccgccgcgccatggaggttgcagcggccggcgggcataaccttttactcgtaggcccgccggggaccggaaaatcgatgcttgccaagcggctgccgggtattctgccgtcgctgagctatgaggaagcgttggaaacaagcgcgatttattcagtggccgggcttttgcggggcggcgccgggcttatccgggagcggccgttccgcagcccgcaccacagcgtcagctccacggccatcgtgggcggcgggtccgtaccccgccccggcgaggtcagtctggcccacaacggtgtgctgttcttggatgagctaccggagtttgcccgcgacacactggaggtactgcgccagccgctggaggatggcagagtcaccgtcagccgcgtacacggcagtgcgtcctacccctgcaagtttatgctggtggccgccatgaacccctgcaaatgcgggtatctcggccacccgacacgggagtgcacctgcacacccagcgccgtggatgcctaccggcggcgcatctcggggccgctgctggaccgcattgacctgcatgtggaggcactgccggtcgaatatgacgatctcgcgtccgagcagggcggcgagtccagcgccgatgtgcgcgcccgggttattgctgcccgcgccctgcagcgtgagcgctaccagactttgcccggtgtgcggtgcaacgcgcagctgccctcggccgcgctgcggcggtactgccgcatgacccccgccgccgaaaagatcctgcgcggcgcgtttgagcgtttgggctacagcgcccgcgcctacgaccgcattttgcgggtagcccgcaccgtggccgatttggacggcagtgaggtactggacacggcgcatctgtccgagacgctgcaatacagaacgctggacagaaaattcgggatgtagtaaagttcatacatcatcacactcttttatccccgttaaaaatggggcatagctcatgtcgcgagctatgccccatttttaattttgctgcaattttataagaagtttcttctcccagttcttcaaatccgcaatggcttttgtcacctgctcacggacttctgtctgcaaatcattttcggtatcaatcccatatttttttgaataaacacgcttgtaccgataatcttcccgctttttgtcgtttggttttgcgatgtctataattttattttgaattttctttctgtcctctggcaaattccagccgccgagttcaaagacaagcgaaagggattcatccgttctgccaaaccaatagttatagatgttgctgttgccccatgacccattgtttgcagacagcggcggcagtactgcgtccatttcttttgtgtggaagcacagccaggaatccgttgaatttgcgtcaaaaacgatactaccctcatcgctcatctgctgtagggtttctctgaccgccgctgcgatttgcccgcggttattcacgcggtgttcaaatatgaggtccagtgctttttgatgttttttgtatattttatcgcatatctctatcaactgttggtcgtccacaatatctctcctgataatcgctatatagttgtcaatcatcaaccgcacatccggaatcaagtcgatgccgcctgaaacactttccagtgtttcaacaatatccagataggtcatcacatcccagtactcttcatcactcggcaattccccgtctggtgtcagatacagatagattctgcaatagtccgggtacgctttttcaaggatttttcgataccggttcagctggtcactgtgctcatgcgacccaaccttattttcaaatgctatcagtgttttttcttcgctggaggtgagcaaaatatctatattgttccactccctctgtactgtaaagctgtaaaaatccatcaatgccagttggaacacatcgtaccgcccagcactatcattcgccaccagtttttgcaccagcgcttttacatacgcatcacccataccatggttttcatttgcattcaaaagccacgccagcatattgctgtgacgtatttcagtgcgtgaaatgcgaagcacatcaaacaggttaaatttccccgcccacggaagcaattcattcaagcagtctatgtccagcaggaatttttttaatgcctcttcattcgtcatgataacatccttattttgccagaatttgcagcagcctttcggcgctcctgtcccagctgtatttttcgagaagggcggcggtgggagccgtggccggggtgacatcatcgacatcgccgtggttgacggcaaggtcgatataggcggcactggggccgtagacctcccgcatgcagggggtatcgctgacaatgatctcgggcgcgccgcaggcggcagcctcaagcggggggatgccaaagccctcatacagggtcgggaacaaaaatgctcggcagcgggccatcaacgccttggccgcaccgtccgacacatagcccagatacagcacattcggcagatcggcaaggccaaggcgctctgcctgggccgcaaggctgccgccgcctgcaatggcaaacactgcatcgggccgtgccttggctgcacgcagcacccacgggaaattcttgttcttgagcagattcgccatgctgaaataatacgcgccctctttcagctgcggataggctgcaaagatgctgtcatcgggcgtgatgcgctccatctgctgccatgcgttgtagacaacctctattttggacgcaggcacgccgtagtatttggtgatctcacttttggagaactccgacaccgtgataatgcgctcggcctttttggcaatgcggcgatactgcaggcggtgccatgccgcactcagccggccgcgcggatcggtatagaagtccgggcgggcgcggtagcaaacatcgtgtacgaccgcaatgccccgaaagccgaacagcggaatgacattgcaggtagcaagccccttggcgccgcgctgcttcagatagcgcggataatccagctgctgccatacaccgcccttgtgcgtgccgaagggcacagtctttatatttacatacagcggagtctcaaccccctgcggggtgacgatttccacaaggccgggcggcacaatgcggtcgagtgctgcgagcagctcgatagaatagcgctgaattccggaaaggcgctgggcaaaaaaggagccgtcaacggcccagacagtttcagacatgagcaaatacctctttatagcgcaagattttattgacgctttgatcaagacgctcttgcgtgatcgtgccgttttgtacggcctccagcacggcagcgtaggcctccggcagggagtttggcatcaaaagtacatcacagcccgcctgcagggccagcacagcggcctcaccgggggtgtaggcatcggcgatggcatccatcgccagcgagtcggtgatgatcagcgtatcttcggcgttcggaatcattgcgatcagctgcggcgagagtgtggccggggtattgctgcctgtcacattcggcgcggcaatatgccccaccatgacggcatgcaggccggtgtccgccccaaagggcagcagttcgcagtttgcaagctcctcctgcgttttgtaggtcacggccagcgctgtgtggctgtcctcggcggtgtcaccgtggccggggaagtgcttgagggtcggcagaataccgttctgccgcaggccgtctgccatagcggcggccatggcagccgcggtaccggcatcggatgagaaggcgcggctgccgatgatcgggttatccgggttggtgttcacatcggcatcaggcgcaaagtccatagtaaagccgtattccttcagataagcgccgatggtctgccccatggcgcgggcatcctcggggtcgccgcttgcgcccacggcggcagcgctggcgtagcggggcagcgcaaacgcatcgttgttcgccagccgggcgataagaccgccctcctcatccaccgcgataaacagcggcgtggcgcttgcgtcctgcaactctttattaaaacgcgccagctgggacggtgattcgatgtttttgccaaactgacagatgccgcccacggggtattgctgcagcgccctgcgcatatcggttgtcacagcggtcacgccatcagccttcgcatcgttgatcgtttcctgcgaaaggctcaggtcgagtgcatccgggcggacaatgaaaagctgaccgaccttttcttccagcgtcagcgcatcggcgggctgcgcctctacggtcggtgtcgctgccggggcgggcgttggggtgggcgttggcacggccgcattgcaggcgcagagcgccgccagcagaacgggcagaaaaaaacgctttttcatggaataccacctttccggggggtgcgggcagcagccccttttgtatcgctcatcgtatactatatagtagcatatttcccggccccgggcaagaaaaatgcgctgcccggcgcggggcagcgcattgcatcatcattccggcaggctgtcggcgtagtcatcctccccgccgacggggtactgcgccaccgggtcgctggcggcggtctcggcggtggccgtttcatcgtataggctttcctttgtcactgcgtaggcaagcttggaatcagcgttgacctcatacacaacggtcggtgcagcatcgctggcaagataacacaggctgtctccgtcactgctgtccgcagcggcggccaccgcattgccgaaccgtacggtcaggcttgtgccgtcagtgaaggtcagcacggctgtgacatcggggctgtccagaccgtaggcggtatcggcctcgggcgcggtgacggtccacgccgtctgcatctgcaaaatcgtgtcggccatctttttgacgctgctctggctcacgggatagtccgggtcatcggtcagcgtccagctgccgtccgtctgggtaaactgcaggtcgttcacctgcatggcagccacatcgctcagcgtcttgtcggtcagcgtctgcgccttgtagaggtcccgcggggacttgctcagggtcgcaaggtcgctgcgcataacggtatacgccgcgccgctttcgtcgtagacatagtagacatcggcaacggtgttcagctggtccaccgtcagggcaagggtcttttcccccgcgccgatggtgatggtcatctggggtgcagcgctcttttcgggcagctcggcaaggtcactgccctccagcttgcgcagcgccgccagcgcggcatattgctccacaaggcttgtgacctttgcctgatccagcggcagggccgggtcggaatccagcatccagtcccctgtgctgcccttgagcagggtcacatccgtattattgccggagtaggccagccggtcgatctcctccgccgtaaagctgcacagcgggatcgttgtatccacggcatcagcgttgctgcgggtcagcaccgccagcaggatgcccagcagggcagctgcggcaagcagcacagccagcggcagcagcttttttgtttttttggcgttgttcttcatggctctcctttatctgcggcggcgcaccacgcaaatcaccgcacccgcgatcagacagacgatgggcagcaccaacgtaaacagcacacccagcggcacagccgccgagaccggcacattcagcgaggcggcgctcatactcttggcgttgatgaccgctgtggtctgcgcgccgttcagccagttgacggcactgcccagcagctgcgcattgccgcccgacacctgctggttgatgctgctcagcagcaggttcgggcagttgacccagacgacccgcgccccggtcgcggcattctcagccgcaacagccacggcaaagctgccctcggggtcggtgtcagccttctgggcggtctcggcagtggcgtagttttccatcgcgtaggccgtatcgccggtggtcagcagacgggtaaaggtgaattcgctgtcctctgcggtggtaatgccctgcgcgatgggggtgtagatcatcatgctctgcggcacacccgccgtgatctcattgctgaccaccgtgggcagcaggtaggtctgcgggtagccgtaggggtaatggtcggcgtctgtttcaatcagcaggccgggctggcggttcatgccgcaggcggccagcacagaatccagcttcggcgttgcggtcgtaaaatcggtagtcacaaacagcttgccgccgtttgcaacatactcgttcagcagcgctgcctcggcatcggtcaggtctgcccccggcgcgttgatgagcagtgcgccggcgtcggccgggatgctgccgctcgtcacaaggttcagctctgtcaccgtgacgccggcgttgttcagagtctcggtaaaatcgctggtcagagccgtctccccatggccggtcagctcatacagctggtaagcctcggtgcgggtgaccttggcgatgccggaggtgatggcgttttctgcctgaaagctgtagtttgccgtgccggtggtgtagtagctttcaaggtccatctcatacatgtcattgtaggaaagtacagtgttgttttccccgctgaccagcacgacactgccggtagaggcaccgtcatactgctgggcaaaggtcgggtaaagcaccgggtcccgctgctgccagctaaagtggctgctctcgcccgcatagcggtcaagcaggcgggtgatgttggcgtcctcctgcccgctctcggccagatagtaggcggtcacatcggtgttcagctcatgcagcaggttctcggtcgtatcgctcagggtaaagagtgcggtcgtggagatgtcatactgcgtatatttggtaggcagtgcgcggacgacaagattcagcagcacaaccaccgccagcacgaccgccgccagcacactggcgtacaggccgctgtgcagggtgcgcttgctgccgccctgccaaataccattctgttttttcatgatcggtgtacctcctcagttccaacggcggcgtgcgagcgcctgcccggtcaaaaagaggaacagccctatgaccgacagatagtagacgatggccgggatactgaacatcccgcccacaatgtccttgaacggttcaaacagggccagcgcggacagcaccgcattgaaggccgccaaaagccaggccgggcgcagctgaaacagcacaaacagcaccaccgcgcccgcgcagaatactgcagcgcccgccgccagccgtttgcagatgacacccaccagaacggacgccaccagcagcacaatcataaagacaacaaacgccagcaggttgccggtcgtgaacatcgtctggataccgttcatcagataggccaccagcagcgcaccgaaggtggcaagataggccagtatctggttttcggtcagagcggagatccatgtgcccacagccagacaggcgccgcccagcagcagatagcccagcagggcgctgtaggccgccaccagcgacaccgtgccgaatgcctgcagcagcaggggcattaccacagccgccgccagcggcagcgcaaaaacagcgagttctgccagaaacttacccgccacaatggccggaatgctgaccgggctggtcaaaagcagctggtcggtcttgtttttgcgttcctcagcaaagctgcgcatgctgatggccggcagcaggaacaagaggatcatcgtcatggtgtagagtacagaggcaaaatctgacgaagcatagagtaaatttcggtttgtaaagtacaagcccagaaagaaaaggctgacggcggcaatgacccagccgatcataccggtaaagcagctcttgaattcgcgcttgaaaatagctgtcattgctcgtcaccctcctttgtatgatcctgctgcggggtctgctgtgcctccggggcctcggtcagctgcaggaatacatcctccagactcatcgtctcggcgcgcaggtccagcaccgggcagcctgccccggccaacgcctgtgaaagcgcaccgcgcaggtcggtgccctcggtgctgacggcagtaaagctgacctcgccgcccttttcctcggtcacggtcaggttcgtcaggcccggcacggtgcccgccgccgcaaggatttcctcccggctgccctgcgctgtggcggtgatggttcccctcgcagtcagtctggcagccaactcctccggagtgccctgcgccacgagcctgccgtgggcaatgatcagcacccggtcacagacggactgcacttcacttaaaatatggctggacaaaatgaccgtgtgggttttgccaagatcccggatcagggaacggatctcgatcatctgcgcggggtcaaggccgacagtcggctcgtccagaatgatgaccttgggcgtgcccagcagcgcagcggcaatgccgacacgctggcggtagcccttggacagattacggataagccgctgctccatcccctgcagacccgcgcgggcagcggcatgctctaccgccgcaatgcggtctgcctttttgcgggtacccttcagctcggccacaaaaagcagatactcccgcgtggtcatctccggatagagcggcggcagctccggcagatagccgatgcaggccttggcctcagcgggttcctccgcaatgtcatggccgtcgatccgcacggtgccgtctgtagcggaaatatagccggttatgatattcatcgtggtggacttacctgccccgttgggacccagcagcccgtaaatgcagccgtcctccacggtgaagctgatatcctccaccgcggtgtggccgccgtagcgctttgtcagatgctctacctcaatcaaagtgcgcactctcctttatcacttgggttcaagggcattgctgcagcgcagaaattgtgcagggatgcccagacttttattataatttgaaattgtgaaaaaattgcgtgaatggtttgaagaagtgtgaaattctgcacgccgatacagcaaaaagcgccgcgaaatccgggcagcagcccgttttcgcggcgttttcttaattaagttcagaaggtatcgtggcgcacaaagccgcccagctcctcggtggtggtcatgcctgcggccagcgccttgctgcgcatagcggcataaaactccgcataggtggcctgcatgtacggctccagaaagaagccgccgatgccgaaggtgaacgcgcagagcagcagccagccaaagaaggacagctgcaggacgaagtaattccacttttcgccgtccatcatctggttgctcagctccatggcgcgggtggcggacatgtagggattttcagccagcaggtagggtacgagcgtgtagcagtagtcccaataaattcccggcacaacgagcagaaggaagcccagaaaaacctttaagttggtgagcagctgcacgaggatggggttgccgtagggctggcggaaggtgctgacaacggtggaggccggggtcagggattggcggctctccataaaatagcggcagcggccgaccttgagcggatacaagacgaacagcacccaacagatgctgataatagcaccaataaacgcaccgaccgcgagcgccgcaagcatattgtccgggatgccgctgaacatatcataaatcgaggcggtgtccccgctggcggtatccacggtctgccgcgccgcgctgccgctgctggcactggccccgcccaacccgacaaagctcagcacaaggcagacccaaaagctgcgccagtaccgtccctgcagtgcctgcttggcgttggattttaaaagttcgcgtgtccacataagcgtttacctccctatttcatgcagtatattccctgcgttgtaagcaccacaaggcgggaattgtgtagaatattgtatttatattatagcagtttatggcgcaaaagcaagtattgcgccgcattgtctgctcgattcagcgttatattttgagtttgttcacaaaaatataaaaaagttctgtttttttgcaaaaagcgcttgacatttaccggttgtttggctataataatacctgtcgtcaggccaacggccaagatgaaaacaaaatatgcggatgtggcggaactggcagacgcgctagattcaggttctagttcccttaaaagagtgtgggttcaaatcccttcatccgcaccaaagcgagtgttcttacggcatttgaaaggctgttaagaacactcgcttttttcatacagtgagttggtttgaggcgtagttgacgactacgccttttcttgtattcaccgacaactgcggtgccggaagtgggaacacatcgggaatgaagatggctcccacacagtagcttcccctgtctgcggcaaagccgccaatcgtagcgcggggaaagttccctgtgcgaagattaagccctcggcagagggcacacgccctttagggtgtataagtgcgcccttagttcctaagggatttattcggcgttcctcgcgggatagcttttgccgcaagggtttttccctgttctcatactggcggattttcttctgtccgtcctcaatctcggcggtcagttcttcaaacgtttatgcttttggtttcgtcatgggtggtcgctcccttctgcctgtcggcatagaaaaaggacagtcgattttctcggctgtcccttgtaaaacaatattgagttttggcgtgcagtttcgcaattcttaaacaaaaagttgaataagaaaaattgcaaaaagatgtacgggataataaatgtagaagaaccactttgaaattttgagattagactttgtatggatataaataaacggtaacgccaacaaagcgaaaatctcaaaacctatggcatgcccgccaattttaagtgcaagcggatcctccatgtatccattaagcgcgggtaggtaggtaagcgtataaataattgctcctaaccacggcttatttctgcacaagtagaaaatcatcatcaaaataagccctgtcattgcatagtcaaagttgactacgttcaacagaataattcccgctataaacagccaccattttttctccttaaatccccacgtggcaagaaggctcactatcaaagtgaaaaaaatattcagattaaaaatatttccgacaatatcatctgaattaaacgctaaaatccaaaagggctgtgagatgaaagcaaaagctcccaaacgaagcagatattttttgatgtcgtgggtatataacatacctactgttaagcaatagcagaaaagcggaaaagctattctgcctatccagcggaaaaccgggtattctgggaaaaaggctcccccaacatggtctaccgtcatagaaataattgcaatgagtttgattaagtttgtatcaaggtttgttttcagtcgttgttcttgcatacttaaaagctccttataaggggtatagcgtaccgcatttaccacacgctgaataattattttaccagcataagatggaaatgtcaaaaagttgtttcagtctgtcggcggcgttgttctctctggcatacctccgcgccgcttctttaagtcggtgttgtgggtacggatatagaatagtagctgttgatggtggtcggtgcgttatacagcgccgccagcagatatttcttgatgttgcggacatactgccttgctcttacattataatactgccaagcatgcacctgccgggtgttgcgttctccggtacggctgcaatacagcaaatcacgcagataaaaaagaagtcacctaaaaactttcgcttttaggtgacttctttggtgcggatgaagggatttgaacccacactcttttaagggaactagaacctgaatctagcgcgtctgccagttccgccacatccgcatattttgtttttgccttggccgttggcctgacgacaggtattattatagccaaacgcccggcaaatgtcaagcgtttttccgcaaaaaaagtgatatttttcccacaaaaaagcggccgcctgctttttgacagacgaccgcattttatttgcaaattaccagagatttacgacctcattgtacaggccttcgtagctcttggcggagttggaccagctgaaatcgcactccatggcgcgcttgaccagcacgggccagccatccttataccagtagccctccttggcacgccagcaggcttcgtacaactcgtgggcattgtaattggcaaaggtgaagccgttgccgtagccatcgccggagtcgcggatggagtccttcaggccgccggtctcgcggatgatggggatcgtgccgtagcggcaggagaccatctgcgccagaccgcagggctcggagcgggacggcatcaggaacatatccgcaccggcgtagatctcctgcgccagcttggcattgaaaccaatgtacacaccgacacggcccggattgcgggcgcacagctcattgaagaagttctcgtactgggcttcgccggagccaaggaccaccagctcaatgccctgctgcagcagaccctctgcaatggcctgaaccagatccactcccttgtggccaaccagacgggtgaccatggccatgaccgggctgccgtccttatgcagcccaaactcgtcctgcaggtaggccttgcaggctgcctttccatcctggaaggtctcggcatcgtagtttttggcgatgtcgggatcggtcgcggggttgaaaacatccacatcaatgccgttgaggatgccgcacagcttatactgcttctgacgcagcaggccgtccagaccatggctgaaccacgggtccagaatttcctgtgcgtaggtggggctgacggttgtcaccttgtcggcacactcgattgcgcccttcatgaagttggcgcagccgtcatactcaaccacatgggcatcgcgggcgccgatgccgcaggtgtcctccagaatatccagaccatacttgccctgataggcgatgttgtggatggtaaagaccgtcttgatgcggctgaatttatccagatggcgataatacaggttcagataaaccggggtcagcgcggtctgccaatcgttgcagttgatgatgtccggctcaaaatccgtgtagaacagcatctccagaatcgcgcgggagaagaaggcgaagcgctcgccgtcatcgtagaagccgtagaggccgctgcgcttgaagtaatactcattatcaatgaagtagtagaccacgccgtcgcgctcggccttgaacaggccgcagtactggctgcgccagcccaccggcacgctgaagttggtgacataggtcagcgtatccttgaatttcagatcaccatacagcggcataaccacgcgggcgtcaatgccatcgcggaccagcgccttgggcagagcgcccgcaacatcggccagaccgccggacttggcaaacggggcagcctcgctggctgcatacagaattttcataagcacctccgtgcgaatttcacaaaatgagggcgagggaaagcttctgctctcccccgccctctcatcaaagccggctccggggagagggagttcgacctctatgagcgttattctcccccaacaccggcggcggaccgccggtgcggatggcgtaccggttatacgctgtggtttttagcaataaataccgggaaggtgtcggtgccggcaagcctcttgtcctccgtgatgtggacattcttgtcggtcacaacatactcaacattggcgttgggctcgaccacggtatcctgcatcagcacgcagttcttgatgacagcgcccttcttgatcttgcagccgcggaacagcacactgttctcaacagtgccctcgataacgcagccgtccgccagcaggctgttcttgacggagctgccctccagataacgggtcgggttatcgtcacgaatcttggtgtagatgggagccggtccgaacagtgcgttcatgctgccgtcctgcagcaggcgcatattctcatcgaagtagctcttcatgtcggagatgcgggccgcatacccctcaaactcataggactggacattcagcagcttgaggttgcgggccagaatgtcgcgctcaaagtagacaagaccgcggacagaggcatcgtggatcaggtggatcaggctctcgcgctcaatgacatagatgttcatggcaaggttctgctcgcccatgcggtagtcattggagaggatctcggtcacgcggccgttctcatcggtgcggatggtgtagttgtcgctgcgggcaccctcagggatgggggcgcggttgtagaccatcgtgacatcggcgccggacttgacatgggcgtccaccagcttgccgaagtcaaagttcatggcaatgtaggagtcggacaggatgacatagcgctccttctgatcctcgagccagttcaggatgctgtccagagcgtccacacggccggagtacatcttgacgctgcgctctgcaaagggaggcacgatgttcaggccgccgcgcttgcgggtcaggtcccactcacggcctgcgccgaggtggtccatcagagagtggtagtttttacgcacgatgacagacacattgtcgatgccggcgttggccatgctggacagcgtgaagtcgatcaggcggtagcgtccgccgaaggggatggaggccatcgagcgctccgccaccagttcgggaacgaggttatcataggtgttggcgaaaatgacgccgagagcgtttacattgctgtttaccattgttcctcaccatcctttacatcgctggaaaccattgccttggggccgaccgttgcacccttgccgatgacaacgccggaaccaacggtagccacatcaccgggctcggcaatgttcaggccgccctccggcatggcaccgacggtggcgccctcctcgatcgtgacattctccgccacgatgcagtgcttgacggatgcgcccgccttgatgacggtgccgcccataacaacggctgcctccacggtggcacccttttccacaacggcaccggggaacaggatggagttattgaccgtgccgttgaccttgcagccctcggagatcatcgaattgacgatggtggcatcgccgccgatctgctggcagggacggccggtgttgcgggaataaatcttccagttttcatcgaacaggttgatgccggaatgcttggggtccagcacctccatgttggcctgccacaggctgccgatggtgccgacatccttccagtagccgctgaagtggtaggcgtacatacggcggccgtccttcagcaggttggggatgacattcttgccgaaatcgttctcggagttggggtcagcctcatcctcggtcaggtacttcttcaggatatcccagttgaagatgtagatacccatggaagccagattggacttaggctccttcggcttctcttggaaggcgttgatgcggtcgtcctcatcggtgaccatcaggccgaagcgggaagcctcgctccatggcacctccataacggcaacggagaactctgcgttcttttccttgtggaagcgcaggaagtcagagtaatcctgcttgcagatctggtcgccggacaggatgatgacatacttgggatcatagcggtcaatgaaggacaggttctgatagatggcgttggcagtgcccttgtaccagtcagagccgctggcctgctggtagggcggcaggacatgtacgccgccgtgcagacggtccaggtcccaaggctggccgttgccgatatactcattcaaaacaagcggctgatactgggtcaggatgccgacagtatcaatgtcagagttgacacagttggagagcgggaaatcgatgatacgatattttccgccaaacggaacggccggcttggcgagcttttgggtcagcgcatagaggcgtgagccttggccgcctgccaggatcattgcgatcatttctttagccataagatttctccccttaaatttcggcgtatgccgtttttaactttatgacattaccgcataattccggctgccgcctgctgcgatgcctaggcccgcagggcagggattttgcggtgatgctatttatccaaaggcggtcataccgtcgttttggctttgggcgggcgtccccggcgtttgggggccgcctctgtcttggccggtgctgcaggggcagcggccttcgcagtggctttacttgcctttttggcagcgggctttgtcggctctgccgccttttcgtcagcagcatccgccttcttggtacgcggcttgcgggctgcgggcacactgagatagagggtggacatcggcggcagtgtcagcgaaatatgctgttcaaagccgtgcatcgggcctttctcgctcttgaccgtgccgttggtgacaccggaaccgccgtacttcttgtcgtcggagttgaggatttccttgtagctgccggggttcggcacgcccatctggtaatccttgcggagcacggggttgaagttgcagacaacaaggagcatcttccctgccgcatcacggcgcaggaaggcgatcacgctctgtttgctgtcatccggcacgatccactggaagccctcccagctgtaatccacctgccacagggcgggcgtttcgcggtagaagtggttcagatccttgacatagccctgcagctcgcggtgcttgtcatagcccagcagcatccagtcaagctgctttttctcgtcccactcgataaactggccgaagtcctgccccataaagagcagcttcttgccggggtgggccatcatatagccgaagaaggtgcgcaggtttgcgaacttttcctcataatcgccgggcatcttgttcaaaaggctgcacttgccgtgtacgacctcatcgtggctgatgggcagcacaaaattctcgctgaaggcatagaagaagctgaaggtgaccttgccgtggttgcccgcgcggaagagcgggtcggtcttcatgtagctgagcatgtcgttcatccagcccatgttccacttgaagttgaagcccagtcccccatcggcagccggctttgtgaccagcggccatgctgtggattcctcggcgatcatcattttatggggataccggcccagaatggcggtattcagcttttgcaggaaggcgatggcctccagattttccttgccgcccttgacattctgctcccattcgccgtccttgcggttgtagtcgagatagagcatgctggccacggcgtccacgcgcagaccgtctacatggtagcgatccacccagaacattgcactggaaatcaggaagctctcgacttccttcatgccgtagttaaagaccatcgtgccccattccttgtgctcaccgcggcgggggttggggtcctcatagcagggggcgccgtcaaacatgtacaggccgtagccgtccttcgggaagtgagcggggacccagtcaagaataacgccgatgtccgcctgatgcagcttatccaccagagtcatgaaatccttgggggtgccgtaccggctggtgggcgcaaaatagcccgtgacctgatagccccagctgccgtcaaacggatattcggtgatgggcagcagctccacatgggtgtagcccatctccttgatgtacgggatcagctcctcggccagctcggcatagttgtacgggacgccgttctcgggatccttcatcttccagctgccgacctgcagctcatagatggacatcgggctgttgatcacatcccgcttttgctcatccttgatccaggcggcatcaccccattcatagccctcgatgtcgtagaccttgctgccgttggaggggcgggtctcggtatggaaggcatacggatcggccttatagaccagctcatccgccggggtggtgatgcaatatttgtaaacatcaaactgcttgatgccgggtacaaagcgctcccagatgccgtccgttaccatctccatcggatgctcaccgggcgtccagctgttgaagtcgcccacaatggaaacggccttggcatgcggtgcccagacgcggaacaccacgccggcctccccgttctgctcacacagatgggcgccaaagtagcggtaagcttcctgattgttgccctgtttgaacagataaatgggcagatcggagctttttggcgtttctttgcgctgtttcaacataatctccccttttggcggtgctgtaccgggtacaatgcaccgactttgtatgatctctgtatctatattacatgtttcatgcgggaatttcaagggtttttgtgtaatattccgctaaaattttcgtatgttgcctgttcgttttgtacaagttcgacatatattgaggtgtttttcgtacgactgtacaaaaaattcccctgcagggtgttttttacaccctgcaggggatttgtacaaaatacttctttatgcgccgtagatataataagggttctcgccgctgtacacgctgcggcggttccagacggtatgggtggccagatactcggcccatgcatgatagcccgccgcattaaaatgcacgccgtccttggtggcatagtcatcgatctggctgccgtccgccgtgttggtcagggcctcccggatattaacatagtaacagcccttgcgcagcgccatattggccagcaaatcgttgacggttgcgatgcgctggttgtccagccccggcttggaagctacgaccgtctcctgcacgccggggatggcctgaatataaaggatgacgccggggttgagctgctcgcgcagcatgtcgatcagacgctcatagtaggcaatgaagctgtcctcactgccctgcacaaccagattgttggtgccgaccagaatatacaggtagtccggctggctggccgcaatggtctccatcggggtctcggtcgcgccggtgacagcgttcttgacgctgacattgttgacaaaggtctgcacgcccgcgctgacataggtcgcatagtgcgcattgtggtagcctgtgtcatagatgccgaggccggaggcaatgctgtcccccgcaaaggtcacggtgttgaagtagtccttcgtcactgtgcccagcatcgggaccgccaccatccggtggtcggtgttcaggaactccgtgtctatagtctgggcgaccggctcggacttgtcccacgcggcggtatccacgctctgcacaaggcgctgcggctcggcgatgggctgctgggtcggcgcagccgtgggggccgccgtcgcagtcggctgtgctgcggcgctgtctgcctcctgcggtgccggggtgccgttgtcacggaaccagtaaaacccggcccctgcgcagagcagcgccagaaggacgatcagggccaaaaacaatttccgcttgcgccgcttaccggcaacctcactgcggtaggtataaaaatcagccataaaagcctcgcttctctttccctaaaaactatacactgttattatacgccacaaagcccccgcgcacaagagccgcgaaaatgttttacaaatttgtaagacggaattgtaggctgccggaattgtagcaaaaattagcttgacgcacccccatgctgcccctataatataagtaagagtatgcgtgaccatcagtcacagaacggaggtcctgccccatggcatggatgatcgtatgcgacagctcctgtgagatccgcgagctgcaaaaccctgcacccggtgtgcagtttgcccttgcaccgtttaagatccgcgttggcgagcgggaatatgttgacctgcccacgctgaacacccagcagatgctgcaggccatgaccgactacaacggtgccagcaccaccgcctgccccagcccggaggaatgggccgagtatttcctgctggcggacaatgtctttgctttcacgatcagcagcaacctgtccggcagctacaacgccgccattgctgcgcgtgagatggtgctggaggagcatcctgagaaaaacatcttcgtgctggacacgctgagctgctccggcgcgctggccggtgcagccgaacttgccaacaagctgatcggcgaaaaccagacctttgaggacatctgctttgcgctgcagaagtttgtcgaaagcacccatatcctgtttgctctggccagctttgacaatctggccaaaaacggccgcgtcagcaaggtggtcggctttattgcaggccgcctgaatatgcgcgtgctgggccgccgcacatccgacgggcgcattgacttctatttcaagacccgcggcgagacccgcgtgctggcaaagattcttgagcagatggtcgaggacggctacgacggcgtacacccggtattgatcagcgagtgcggcaaccagaccgcttcccagctgctgtaccacggtattgaggccaagtggcccggcgcgccggtgcgcatcgtcccctgctccggtctgtgcagcttctacgcacaggatcagggcattatcatcacctattgaggcaaaaatataccgccgtgcatggatttgcacggcggtttttgttttgttggcttctcccttggggggaagctgtcagcggccctgaccgctgactgatgaggggcaggtgtacggccatcatccgttggcgggatataacatatacccgccccctcatccggcctcaggcggggcctcggccaccttcccccgcccgcgggggaaggcattcttattccggcagccgctccttcacgaaatccaggaacgcctgcgcagcaggggcgagattttccccgcaggcaaggccgatttccatcatctggtggggtgccatcgggcgctcaaccacgccggggtagcccggctggtggttgatggcattgttgacgctgatacccagccccgccgagaccatggcgtaggtagccgtaatatccatcgtggaataccgggcatcggggcgcgccttgatcttgtcgaaaatcagggtgatgtccgtctccatgccggggtagctctcgatgaagggctcggttttcaggttctctaccgggatagcctcctgcgcggccagcgggtggctcttgggcagcaggaccataagctcatcctgccggataggcagccagaccggcagatcatcacggtgactgatcaggcagaagtcggtgcggtgatcgagcagcatctcagccagctcgctgctggtgccgttcacgatcttgatgaccacgccgggatgccgggtgcggaaggccgccatcatctgggtgacccactcataataacagttgtatgccgtgccgatgacgatcgtgccgcaatccgcgccgcgcaccttggccgcgatctgctccagacgctcctgcgcaaagagcagctcacgcacggacggcagcagctggcggcactcctcggtgggctgcacaccgcttttggcgcggtagagcaatgaaaagccaagttccttctccagcgttgccacgctgcggctgatgccggagacggtaaagcccatctcctccgccgcagcgcgcaggctgccgcggtcgattgctttcaataagatctgccagcgttctgtgtccattctgcacctcatatgttgctttagttgcaatcctgtaaaaaccatgtttcgttttcatcaatcatagtgcagttttccgcttttgtcaagccggaaagcaaaaaggctccccgcaggtagtggcgcataagacaggtttataaggtttagagagaacagcgtggcggaagtcacgctgttctgcttttgatgtgtgagtgagcatttcggcaatgatgctctccggcaggaagccaatgcaggcaaggctgatatgcacatcctgcactcgctgcccgctgctcttatccggcgcggaaacatagaccctgttcacaagatcatgcagcacggcgggcgtcagttcctgcaaattgggatatttcttcgcccggaggatgaactgctcaatgctgtcggcttctttctcctgctgggcaatctcctgttccaaaagctgcattttctccgtcagctctgtttgctcattttcatagtcggcggacagcttttcaaatcggctattattgcatttctggaaagcacagattttgaaggcgcgctgcgcacgttggtgtctcccggcggcgacagcgacaccctcgccgccattactggcagcattgctgaggcattctacggcgtgccggaggaactgcggcacgagtgccgcaaacgtctgacgccggagctggcggcgattttgcgccggtgggaaagcgcgctttacaacgaaaaaatctgtggtagaatttgaaatggagaacaaaataaggaggggcttccatggcaattttgaacttttccgatgtgcttaaaaatgtagggcttgacccgaaagatgtcaagctgatccgtcatgcattatctgacgagcgtttcagagaatgttataaacacggtatggcgcacgaatatacacagcaccaaaaagacgggttcagcaaaggatattcctactggatcacattcatcagcgatggcggtacatacgcgagactgcactcttgttatcgtgtcaatggttctgtgcctgatacaccggatgtatgccctgccggattacctgactgtgaagccatggaataccgtggcgaaatggcgttttttgatttgcaatatgtggatttgctgaaagagtacgagggaaagctggtgattgactggggcgggtcagctcggatgtggcatcaaaaagctaccaccgaaaagcccatcgtggcaattgagtcaaagaaccagaagccttttgtgggatttgaaaatcttattctatccttcgataaactaaaagaagttgtcgaaaacgatacggactatgagctgtggcaggcggccatggctgcggtcaatgcggtctatctgattgtggacaccaagacgggagacagatatgtcggctcgacctatggctatgacggcctgctggggcgttggtctgtctacgtcgctacgggcggtcacggaaacaacaagggaatgatcagccacttgaagtctgtaaatcatagttgccacgatttgcagttttcagtgttgcaggttttgtccaaggcacttccagacaatcaaatcattgatgcagaggccctttggaagaaaaagctgctgacctatgaaccattcggaatgaatcagaactaatcttccttgcagcatcctctggataatatatagctctcactttcctttggcaaagcgactgtttcagtccgcttttcaagtagggcggcaaatcccatcaagcgccctccggaagacgcgtggcggcaaaaatcggccataatcaacctttaaaacggcaaaaaagcaaaggggtatgtgtcttaacggcacatacccctttttgtcagcaacccttgtccggcaactgccatattatttgtttcgtgaaacctgttttatggacagctcc

SEQ ID NO: 1121 - DNA, 15871 bp, unidentified
  source 1..15871: mol_type = unassigned DNA
  misc_difference 4960: note = a, c, g, or t
  misc_difference 4961: note = a, c, g, or t
  misc_difference 4962: note = a, c, g, or t
  misc_difference 4963: note = a, c, g, or t
  misc_difference 4964: note = a, c, g, or t
  misc_difference 4965: note = a, c, g, or t
  misc_difference 4966: note = a, c, g, or t
  misc_difference 4967: note = a, c, g, or t
  misc_difference 4968: note = a, c, g, or t
  misc_difference 4969: note = a, c, g, or t
gcggggcaaactggtctcgcagggccagcgccgtgaatacggcctcgatgccgcccgcaccacccagcaggtggccggtcatgctcttggtgctgaccacggtcagctgctttgcgtgctcaccgaacacggcatggatggcagccgtctcgcaggcatcgttcatgtgggtgccggttccgtgggcgttgatgtgatccacctgctccggggcaatgcctgcatcggccagcgtcagcttcatgcagtcgatggcacctgtgccgccgggagccggtgcagtaaaatggtaggcatcgcagttggcaccatagcccaccacctcggcgtagatatgcgcaccgcgtgcccgggcgtgctccagctcttccagaaccagcacaccgctgccctcgcccatcacgaaaccgccgcggcgggcatcaaagggcaggctggcagcatccgggtcggtggcggtggaaagcgccttcatgctggtaaaaccgccgatgcccagcgggctgatgcagctttcggcaccgccgcagaccatggcagtctcgtaaccgtcccggatgcggtggaaggcatcgcccacagcattggtgccgccggcgcaggccgtgaccgggcaggtgcacatgcccttcaggccaaaacggatggccacctgtgccgccgccatgttggcaatggacataggcacaaagtaggggctgaccttctccatgcctttttcttccccgcgggtgtgctgctcctcgatggtgggcaggccgccaatgccgctggaaaggaccacaccgatgtttttggcctctgcttccgtgttcaggccgctgtcggcaatggcctcggctgcagcagccagtgccagcagggtgaagcgggccatcttgcgggcttcctttttgtccacaacggtctcggggtcaaagtttttcacttcaccggccagcttgcacttcaaatcggtggtgtcaaactgggtgatggggccaatgccgcaccggcctgcctttgcggcagcccagctgtcggcagcagtgttgcccagcgggttcacggtgcccagaccggtgatcacgactctgcgtttttccatagagaatttctccttttacattgccatgccgccgtccacacagagcacctgcccggtgagatagctgctttgttctgcggcaaaaaacgccaccgcgtttgccacgtcctccggctggcctgcgcggcctgccgggatgtcctttgccatttcggtgcggacagcctccggcagggcggcggtcatatcagtttcaataaagccgggtgcaacagcgtttactgtcacattgcggctggccagctcccgggccaggcttttggtcaggccgatgagcccggccttgctggcggcgtaattcgtctggcctgcattgccccgcagggcaacgacgctgctcagattgatgatccggccccagcgctggcgcaccatccggcgggccgcttccttgcagcagaggaacgcacccttgaggtttgcgtccagcacagcatcaaagtctgcttcggacatgcgcaggatcaggttgtcccgggtgatgcctgcattgttcacaaggatatccacccggccaaaggcgttcaccgcatcctcaaagagctttttgcagccctcggcggtggaaacatcggcctgcacggccacagcctgcgcgccttcggccctgcacagagacacggtctcggcagcggccgcttcgccgtggcagtagttgaccaccacatggcagccctgccgggcaagctgtacgcacacggcccggccgattccccggcttccgccggtcacaacggcggtacggatgatggtttcttcgttcattgttcttccttccatgtgttcagaacggtgtccagctgcgccggggtctccaccgacacacaagtcacaccgggcagggtctttttcacaaagccggagagcgcattgccggggccgacctccagaatatgatccacacccagctcacccagacggtgcagggtgtcctccatgtagacactgctctgtacctgccgcaccagcagggccgggatgctgtcgctctcggctttttcgcggcccaggcagttgaacagcactggcacctgcatttcgccaaagggttcggcggtaaagcgctttgccagggcatccccggcgggagccatcagacgggtgtggaacggtccgctcaccttgagcgggatacaccggcgggcaccggcctgctttgcaagctctgcagccttgtccactgcggccttttctccgccaatgaccagctggcccgggcaattgtagttgcagatctgcacacagcccagcgcggatgcctgctcacagcattctgcaagggggacccggtcgaggttcagcactgcggtcatgccgcagtcgatgccgctggccgcgtcggccatggctttgccgcggtaggctgccagctcaatggcctgcttggcggtgaatacaccggcggcttccagcgcggaatattcgcccagggagagaccggccacataagcgggcttgaccccctgctcggccagaacggcggatacgccgcaggcaaaggccaccatgcagggttgggtatattcggtctgattcagaacgccgtccgggtcgtcgaagcagacgcggtgcagatcaaacggaaggtctgcagcgtcgaacgcggcacggaatgcggaagatgcttcgtaaaattctttgcccatgccggggtgctgggcaccctgaccggcatacaaaacagcaagcttcattggttttgcctccattcggtcacaagttcatccatcagctcacggacagtgtacatccggtccagcctgcccacattggccccgcagaagaaaagtccttcctccagattgcccttgaccgcttcgatcagtgcatgggtgatgcagtagggcaccttggcggggtcgcaggtcttcaggcagcgggcacagtgccggggcgggaagcgtctgccctccgccatggcctgcaccagcggcgtgttcagcgcccggcccggcattccgaccgggctgtggatgatgcgcacatcctcagaacctgcgttcagcagaacgtccttgtacccctgggatgcatcgcactcgtaggtggtgataaagcgggtggcaagctgaacgcctgcggcacccagtctggtaaagtgagccatgtcggccccggtatacacgccgcccgccacaaacacggggatgctgtggccgaactgcgcctcatagggctttacctcggccagcacctccggcaggatctcgtccagtgtctgacaggttccggagaacaggtcctgctccgcaaagccgagatgaccgcctgccttgcagccctcaatgaccacaaaatcggcggtgcggccgaactccttggcccagcggcgcaggatgagctttgccgcccgcccgctggaaacgatgggcgcgatggcgacctccattgtgttcacaaggccgggcagttccagcggcagacccgcgccggacaccacagcgtccacgcccgcttccaccgcggtgcggatggcggcggcatagtcctgcgtggccaccattgcattgatggccaccataccggcaccgtttgcgatctgctttgccttccgaatctcagcggtcagggcgcggtggttggcgctggccgggtcacgggcaaagtccggctcccgatagcctgcatcggcggtggagatgcaccccatgccgccgcaggccgccacggcaccggccagcccgcccagagaaacgcctacgcccatgccgccctgcaggatgggcacagacagggttttctttccaagcgtcagcattcctcgctcagcgcgtggatacgctgcctcccgccgttccacaggtcatccagaatgtccgccacagggcgtacctcgtggagcattccggccacctgaccggccatcaaactgccggtggaggtgtcgccttcaaacacggcccggcgcagactgcccagggtgtacttttccagctccatcttatcggcaccggccttttcctgccggacatattcacggctcatccggtttttcagcacccggaccggggaaccgccgatgcgtccggtcacgatggtatcgctgtccttggcattgagcagggcagccttgtagttttcgtggatggggcactcctcactcaccagcaggcaggtgcccacctgcacgccgcaggcacccagcgccagggctgctgccagctgacggccatcggcaatgccgcccgccgcaatgacgggcagatccactgcgtccaccacctgcggcaccagcgccatggtggtcatctcgcccacatggccgccgctctcggtcccttcggcgatcacggcatcgatgcccagcttctccagatgctttgccagcacggcggcagccaccacggggatcaccttgatacccgccgctttccacatgggaacatatttgcccgggttgcctgcgccggtggtgaccacctgcacgccttcttccacaacgatctgggcaaactcgtctgcctgcaggtgcatcagcatgatgttcacgccaaagggcttgtcagtgagctgtttgcaccggcggatattttcgcgcagggtgtcggcattcatgccgcccgcaccgataatgcccagtgcacctgcattggagcaggcggcggcaaactcgccggtggcaatgtttgccatgccgccctggatgatggggtatttcgttcctaagatctcgttcagtaatttcatatgatgtttccagtcagcgggccggggcttctctgtgggttggccgttgggacggcccgtttcgagaaagctgccggaacgctgacgcattcactctttatattgcaggatcgcgccgccccaggtcaggccgccgtcaaagccgacgttgtcgcagcggccgatccatggctcgaggcacacgannnnnnnnnnccgccaaagccgatgcaggccagcggtctgcccggggtcagctgcccgctctcggccagctcgttgagggcgaccggaatgctggcggcgctggtgttgccgtggcgatccatgttcttataaaattttgccgggtcggcctgcagggccttgacgcagtggtcgatgatgcggctgttggcctgatggcagaccacccacgacagatcctcgagggtcagccgagtctcgtccagcaccgtgtgcaggcacttgggcagggcatccaccgcaaagcggaacaccgccttgccgtccatggtgatgggggcagagccttcccggctcggcccgcccgcatggaggacatcactgccgcgtgcccccagcgtcaacgcaaagggggtatctgccagccggaaaatggcggctccggccccgtcgccgaacagcacgcaggtggagcggtcggtggggtccatcaggcgggaaagcgcttcgcacccgatgacgagggcatactgcccgcccagagtcgtcagcattccccgcgccacggccatgccatagagaaaaccggaacaggccgcgttgatatccagcgcgggccggttttcgggcaggcccagcgccgcctgtacctgacaggccacgctgggggtggcatccggggcagaaagggtcgcgcagacacagcaggcaatgtccgccggggcaaggccgctgcggtcaagggcctgccgcgcggccgcaatggccagcgtggcggcagattcgtcctcggtgcaccagtgccgggtgcggatgccggtgcggctggtgatccatgcgtcactggtatccaccatgcggctcagcgcgtcattggtgatcgtccgtccgggaagtgccccgccggtggcgatcagctgtaaaccattcatgcgttcctcgtttctccgatctggcggtactttttatagcgctgatcggccagctgtcggtcactcatgcggcacagttctttcaggtgggcgcgcagagcggcatccatgcgctcaaacagggccgcgtggcagcgctgggcaccgcccaccggctccgggatcacttcttccacgatgccgccgcggtacagatcctgcgccgtcagcttcatcatctcacaggcctcgccgctgcgggaggagtccttccacaggatgctggcaaagccctcagggctcagcactgagtagaccgcgttttccagcatgaggatgtggttggccacacccagtgccagcgcgccgccggaggagccctcgccggtgaccacggcgatgaccggcaccgtcaggccgctcatctccatcagattccgggcaatggcctcgccctgcccccgctcctcggcatccttgccggggtaagcgcccggcgtgtcgataaaggtgatgatgggacggccgaatttttcagcctgcttcatcaggcgcagagccttgcggtaaccctccggccccggcattccaaagttgcaggccagattttcctccagcgtggagcccttgcggtggccgatgaccgtcaccggcatcccgtggaaacgggccacgccgcccagaatggctgcgtcctccttgcactgccggtcgccgcgctgctcaaagaagtccgtgaacagggcagagatcgtctcgtcgatgtgcggacgctccgggtgacgggccagaaagacccgatcctcggcagtcagcgggccgcaggagcgcagaatttcgtcctcttccaccgccagctctgccagttcggacgcatgggcggtgatggcttccatgtcactgccgctgcccttcagcgcggcgatctgtgcgtccagcggggccagctgctccaaaatatcttttatcattcgtgtttccctccggcatgaagctgcaggacctggatcagcgtatcccgcagctgactgcggggcaccacctgatccacaaagccgtgttccatctggaattcgctgcgctggaacccggcgggcagtttttcaccgatggtctgctcaatgacacgggggccggcaaagccgatgagtgcccccggttcggccagcatgatatcgcccagacttgcaaagctggcggtcacgccgccggtggtggggtgggtcagcacgctgacgtacagcccgccctttgccgaaaagcgctggatagcggcgctggtcttggccatctgcatcaggctgaaaatgccctcctgcatccgcgcgccgccgctggccgaaaagatgaccagaggcaggcgcttggcggtggcgtactccacggcgcgggtgatcttctcgcccacagccgtgctcatgctgcccataaagaaccggctgtccagcacggctgccacacaggccacgccgccaatgcggccgacggcggtgacagcagcctcgtgcaggccggtcttgttctgggcggcggcaagtttttccccgtatccggggaagttcagcacatcctgcggatcaaggtcagcgtccagttcccggaagctgccgtgatccagcaccagactgagccgataatacccgccaatgggcatgtgatagccgcagttggggcagacatacaggcttttgccccacagggtgcgggcagcgcggcggccgcactgcttgcactccacaaactgcggctcgtgccagacagctccggcatcccgcttggctttcagctggaaagtgcgctcccgcatccggttggggagcagatctcggatatcattcatcgcacgtttcctcagatatgtgcggtgatgtagttgtagatgtcacccacggtcttgagctttgccagctcctcgtccgggatggacacaccgcaggcatcctccagcgccatgttcagctccacggcatccaggctgtcggcctccaggtcctcggtcaggctggcctccatggtcaccttgtcctcctcgcagttcagggtgtcaacaacgatcttcttcatttcttcaaacgtcatggtaatattctcctttgattgacttgtatttttattatctaaaaagtttgaggtttcttgcgaacacgaccattatatctgaatcgtcggataagtcaagaataatagctaaaatattttatcttttacaattctgacacactttcctccacaggggcagttcctcttttccattgccctttttccccaaacgtgctaatatgggtttagcactcagacaagaaggaacgaaaggatgaatcccatgaaattcagcgaaatgagttatacccgcccggacattgatgccctgctgggccagtgcaaggcgctggccgccaaggccgccggggccgccagcggcgaggagctggtgaatgtttactacgagcagagccgcgcctttgccgattacagcaccgccgcacagctggcaagcatccactacacttgcgacacccgtgacgcttattggaaggccgagcaggatttctttgatgccaacggtcccgccgtggagaacgcacgggtggagatcagccgggcatttctggccaacgcccatgtggacgcgctgaccgaagcctttggcaccacctgcgtggctggcatgaagaatgccgtgctgggcatggatgaccgcaccgtggagctgcagaaggagtacaacgcccttgtcagccagtaccagcaggtgtacggcggcgcactggtcgagtttgacggcaagcagctgaccattccccagctgggcccctataaggagaacctggaccctgccgtccgccgtgccgcctacgaggccgaggccgcgtattttgatgcccaccgtgacgagctggatggcctgtacacccagatcgtcaagaacctgaacgcacaggcgcagatcctgggctaccacgattacagtgagctttcctatgtgcggatgaaccgcatcggctacggccctgccgagatccggaagttccgcgaccaggtggccagcgatgtggtgcccgagctgaaaaaggtgatcgagctgcgctgcaagcgcaccggtatctcccacctgaccttctccgacctgcctgtggcgtttcaggacggcaacccctctcccatccccggctacgatgcccggatggccgccgcccgcaccatgtaccacgagctgagccccgagaccgcagaattcattgacttcatgcaggacaatgagctgttcgacgtggagagccgccccggcaagatgtccggcggctatatgaccagcctgcccacctacaaggccccctttatctttgccaactggaacaacacctctgctgatgtggacgtgctgacccacgagtgcggccacgcctttgagggctatgtggccgagcgtgaccccaaggtccccgcagacctcgagtgccccggcatggagagcgccgagatccactccatggccatggagttcctgacggctccctggcaccatctgctctttggcaaggacaccgggaaatacgccctgctccacgccgaggacagcttcctcttcctggcctatggctgcatcgtggacgagttccagcacaggatgtaccagaaccccgacctcaccccggacgagcgcaacgccgtctggctggaactggagcacaagtaccgcccctggatcgatttcgacaacctgcccttctatggccgcggtgcaggctggcagcgtcagctccacatctatgagtgccccttctactatattgattactgcctgtccaccatggctgcgctgcagttcttcctgctgagcctcaaggaccacaaggatgcctgggagcgctacctcaagctggtgcgccgtgccggtctggccagctacacggagctgatgcagaccgccgggctgaaggttccctttgaggatggctcgatcaaggccatcgcccagcagatgggccagtggatcgcagagcatcaggtgtaagcctcccggacctacggagattttttcttgcaaaatccgctcttttctatgaaaaagcacagcgcccccgttcactgtaagatcgcagtgagcgggggcgctttcttgtgaataggaggtggattttatcgcaaatacagactatggggatatacggagcggcacaaactctatgattgaaaagaaaaatttccataaaacgccaaaaagccctcggataagtcatacctatacaagaaagtttgaacttttcgtgaattttctgtgtttcgaccatggacaggtgggaacagttctgctacaatgggagctgttctttccgccggttcccacgcggcggtttttatttttactataacacaggaggaactttcatgttagaaaagatctttcacctgaaagaaaaccacaccgatgtcaagaccgaactcatggcgggtgttaccacctttatgacgatggcctacatccttgcggtcaaccccagcatcctgtccgcttcgggcatggatgccaatgcggtcctgatcgccacctcgctggcatcgttcgttggcactgccctgatggctctgctggccaactatccgttcgctctggctcccggcatgggcctgaacgcctacttctcctacacggtcgtcctgaccatgggttacagctggcagctggccctgatggccgtttttgtggagggcgtcatcttcattgtgctgagcctgaccaatgtgcgtgaggccatcttcaacgccatccccatgaccctgaagagcgctgtcagcgttggcatcggcctgttcgttgcattcgtcggtctgcagaacgcaaagctgatcgtgaacagcgattccaccctcgtcacctatcagcacttcaagggcgagaccttccacagcatcggcgtgggtgcgatccttgcgctggtgggcgtgctcatcaccgccatcctgctggtcaagaaggtcaagggcggcatcctgtacggcatcctcatcacctgggtgctgggcatcctctgcgagctgaccggcatctacatccccaaccccgatgccggcatgtacagcgtcatccccaccagcttcatcagcttcgatttctctgctctgggcaagacctttggtcaggtgttcaagaccgatttctccggcgtgggcatcctgaacttcttcgccgtgatgttctccttcctcttcgttgacctgttcgacaccctgggcaccctgatcggtgttgcttccaaggccgacatgctggatgaggagggcaagctgcccaacatcaagggcgcactgatggccgactccatcgccacctgcgccggtgccgtgctgggcacctccaccaccaccaccttcgtcgagagcgcttccggcgtgaccgagggcggccgcaccggcctgacctccatgaccactggtgtgctgttcctgctggccgtggtgttcagccccctgttcctgaccatccccagctttgcgaccgctccggccctgatcatcgttggcttctacatgatgggttctgccctgaagatcgagttcgatgatcctgctgagggcatccccgcattcctgaccatcctggcaatgcccactgcatacagcatctctgagggcatcgccatcggtgtcatctcctggaccctgctgaatgtcatcaccggcaaggccaaggagaagaagatcagccccctgatgtatgtgctgaccattctgttcatcctgaaatacgtcctgctgtaacaggcatttgcagcaaacagaaagccccggctccggccggggctttcgtgcgtttattggttcctgtgcgggtggggcgggcagggttcagccgccgaacagcccgaaaaagctggtgtgcgtcatgcccagcaccagaaacagaagaatgagggcaaacagcgccccaatgatgatgtccatctggtggaccgtgagggggaatttatcgtagagcttttccttggggttgacgaaattcgggtcgttgttgtccagcagggtcttttttctctcagcgctctgggctttggcggcggcaagttctgcctgctccttttccagctgggcctcccgctgggcaagcagtgcctcacggcgggccagctcttcctcccgctgggtctggttcatttctgccatggtggtatcctccggcgttttttctaccagtataccatagaattgtgacagaaaaaactcctcccgcaaaaagcggccttattccgccagcagatcctccaccacatccatcagctgagacggatcgagctggaacgcggtacagcgcgcggccaggcgaaggacccgcactggggcaacggagacatctgagataaaccgcagttttcggtgtcgtccgtgagatgtagaatacgcggcgatgccaaaggatgtatacgcaccacacgcgggatgataaagtcgttccataacacaatgataccaaaacacaccaatcacctctctatcaaaattgtcacgccgctttgaaacggctgcatgaatgcaggttcgctgcccgcaaaatgttctgacaaaatttatataccatctcttggcttcaaaataaacagccaaaatttcaaaatctggcggcgtgttttgcatgtccggtgaaaccggtggtgcagtaaaaagacgaactgggaaacgagaatgaacaattttacggaatatcgtgtaaaattgaggaaaatcaacttcgcgcagcagcagatgaaagaatgctccgcggaaaaccgaaagcacaaaaagaaaaatctttgccgcatcttaaccactttttgacagaaaaagttgcgaaatcggtcgtaagatcgagctttctggtatatcacttgttcgccgtgcggataaggctgctcattctgctttgcctccgcatcgcctgtcacagaccccggcattgcccttgcctgaaccactttcactccggatgcaaaccagatgaaaaatccgacgggtcgtatcacttgactttcctcttgcgggggagtatactccggggcagtgaaatattcggctatgacgagaaagagtacccggaaagaatgctgcagagagctgccggatggtgcaaggcagtgcagggtgtccgtgggaagatcctctccgagctttccggctgaatgggcggcatctgcgccccagtaagcgggaacggcaggcccccgttatcacgggccgcgcattgttggatgcgcactgaggggccgggctttgcaccggcaataagagtggtaccgcagaggatctacgcctttgtctcttacaaaccgtaagggacaaaggcgttttttgtttgcgggaaagccattttccggatgtttcattgcctttgcatccgcaaaaatcaggacctggaaaaggagtgtttaacatgaaaacactggaaaaagtaagcgactttgtaggcaagtatatggctggcatcgtcattgtggtggcagcgctggccctgttcttccccggcacattcagcgtggtaaagaccgcatgggtcaacaccctgctgggcatcgttatgttcggcatgggtcttaccctgaagccggaggatttcaaggtggtgttcagccgcccgaaggacgtgatcatcggctgcattgcacagttcacgctgatgcccttccttgcatgggcgctgacgcaggtgttccatctgcccactgaactggccatcggtgtcatccttgtgggtacctgccccggcggcacctcctccaacgtgatgacctatctgtccaagggcgacgttgcactgtccgttggcatgactgctgtttccaccgtgctggctccgttcctcaccccgctgctcactctgctgtatgccggtcagcgcgtggaggtgaaccccgtgaatatgttcctgtccatcgtcaaggtggtgctggttcccatcgcactgggctttgtggtcaaccacttcttccatgcgttcacccagaatgccgtccgtgtgctgccgctgatctccaccactgccatcgtgctcatcatctgcgccgttgtgtccgcaaactccgctaagatcatgaccagcggcctgctgatcctggccgtggtcatcctgcacaacctgctgggctacctcaccggctttggcgtgggcaagctgctgaagctggattccaccaagtgccgtgcaatttccatcgaggtcggtatgcagaactccggtctggccacttctctggccgctgcccactttgcacagtatccgctggcaaccatccccggtgctgtgttctctgtgtggcataacatttccggtgctgtccttgccaacttcttcgcccgcactgcagagaagaaggactgatggttcgtaagaaccttgaacgcctggaggcttccgttataactttcaatctactgaacttataatagcaaaggcaggataccaccatcatggtgataccctgcctttgcttgtttaccgttccgagtagtccttccgcaggaacttgttgggtcgaggcccctccatcttgctgcgcaagaccgttctgttgcttgaaatccccactggggcgtttgttgcttcacaaacgcggttttgttggggcgtgcctgccccaaaccctacttcataatatcgatcatgaccgatcaacgactgatttatagtaattgccaaagtctgcaagtgcattgacgatcggtagcatttccattccgagatcggtcaacccatattctactttgggaggattctcgtggtaatcacggcggtaggcaagcccatcatcaatcatctgtcttaagctctcggtcaaaactttctgcgagatcccgtcgatgcttctttgcagctcattgaatctccatggacgctccttcagattgcgcagaagcaagagtttccattttccgccaatcagggatactgctgttgcaaccggacattccggtagctcttcttttgtacgcatatcagtcacctctgtatatagtatatcacattcatttttgaatgtacagttacaaaaaggtgcgtacttgtttttgaatgtgcaagcttctatacttgactcaggcaatgaaagattgcgaatcaaaatggaggtgcttacaatggcaagctacacaaaaatgacagttggaaaagaaaatcggacggagcttcatgaaaagctcggcctgaccggtgcggagatcagcctgaatacgcttcctgcgggagcaaatgttccgtttgttcactcccacaaggcaaatgaggaaatctacggtgttctttccggcaaaggtaaggctgttatcgatggcgaagagatcagccttgcagtaggcgactggctgaagatctctcccgtggcaaagcgtcagttctttgctgcaagcaattctgagatcacttatatttgtattcaggtcaaggagaattctctcgaaggctatactgcaacggatgctgtgatctactgataaaacatatcaaaacaaaaggcagggtaccaccatcatggtgataccctgcctttgcttgtttatcgctctgagtagtcttttttcagaacttgttggggcaaagcccctccatctgctaacacagaccgttctgttgctcaaacaccccactggggtgtttgttgctggcgcaaacgcaaacctccgataaaaaagtacccgaacccttttcctaaaagcgtgaaagcaagaaccgccccatgggcagttccccgatgcgatgaggatgtgcggcgaacttattcgttccaatgttcaagttcttcagcggggtatgcttttgtccaatgatagggctgcaattctttcagctgtacgaatttgattttttcctcttctgcggtaactgctacctgcacatcttcaccccagtatcttaatctctcctggcaaataccgcacggagacaatatctgatagggggatttctcatctttacggacaagacacatgcaatgcgttaccttttcattgaatttatgtgcttcaagcattgcacctgtctcgatacacaaaacagcag

SEQ ID NO: 1122 - DNA, 8517 bp, unidentified
  source 1..8517: mol_type = unassigned DNA
ttattttatagcgtcgagtgcgtttgagatatctgcaatcaaatccaccttgtcctcaagacctaagcttattctgataagctctgccggcactcctgcttccttaagctgctcatcattcatctgacgatgcgtgcttgttgccggatttaagcagcaggttctcgcatctgccacatgtgtctcgattgcaccaagccttaatgccttcataaatgcagacgctgcctctctgccgccctttaagccaaatgatacgactccgcagcctccgtttggaagatacttctgtgctctctcatagtatttgtttgaaggaagccctgagtagtttacataggcaacctttggatgattttccaaaaattcagccactgcctgtccattttccacatgctttggcatacgcacatgaagtgactcaaggccaagattcagcataaatgcattctgtggtgactgcatagaaccaaaatcgcgcataagctgtgctgtacatttggtaatgaacgcaccttccttgccgaatttctctgcatatgtgatgccatgatagctgtcgtcaggtgtgcacagtcccggatatttatctgcatgtgccatccagtcgaatttgccgctgtctacgattgctccgccgagtgtggctccgtgtccgtccatgtactttgtggtagagtgtgtgacaatatctgcgccccactcaattggtctgcagtttacaggtgtcgggaaggtattgtccactataagcggtactccgtgctcgtgtgccacctttgcaaaaagctctatatcaagcaccgtaagcgcaggattggcaatagtctcaccaaacataagctttgtgttcggtctgaatgctgcattcagctcctcctctgtagcatcaggagatacgaatgtagctgtaatacccatctttgccatagttaccgcgatgaggttgaaggtgcctccatagatggatgatgatgccacgatatggtctccgcactcacatatgttgaacatggcatagaaattggctgcctgtcctgatgatgtgagcatggcagcagtgccaccctccatagctgcgatttttcttgctaccgtatcacaggttggattctgcagtctgctgtagaaatagccctctgcctcaaggtcaaaaagctttcccatgtcctcgcttgtgtcatatttgaatgtagttgactgaataatcggaatctgtctcggctctccgtttccggctgcatagcctgcctgtacacactttgtacctatactgtattctttcattgtgcttctcctttattatgttaatgtttcagttggatatagtatattacatttggcgcgttttgacaaattcttcaaatcgtggaagtgtgagagtaattttaccgtactcagaggtatctataaccccctttcttttgagccggtctctatataccgagaataatcctgaattcatatccagtttttctctgatttcttttaccttttcttcaccacttactgatatttccaacaatatttttttatcaagctctgacagctccgaccagattttactgtacacatactcatcaaggcactgatcatattccggtaaaatatcttctatcgtgtgatcatccctgttttcccagtaaagatatcccaatacctggaatgcaaaaggatatccctttgtaagagctgccattttgtctgcctctctttgatccagatcaaaaatatccatatagtgtttcctgactgctgtaaagctaagtggctcaagcattatcttaggcgccctgtacaaaaatgtaagtgccttgtcgttctgcagatcatatatattttcaaacagccccgtcataagcagaaaaataggataatcctgtctcagaaatatctgaaatgaactgacaaatacttttacaaattcacagttcataacctcatcaactgaaatgagtaaccgcttattatgtttctttatattttcaagcatcaattccagcacattttctatatccgtaaccggtgctgcattttctatggaaacgcccagtccaaacgctgaaaaatccagttttgcattgacaaatattttattcatctgaggcatactgtaaatcttagctgcaaggctctgaagcatatctctcgtagggttaagctcaactgtcagccattcctcatccttctttatctccgatactatattggtcatcataaccgttttgcccgatccccttaccccggttatcataaaaagctggtttgcaggattttctgacctaaatgtctctactatctgattggtctgtgagattcttgatatatattgcagtggttttttcccgaatgataatgtaaatggattttgcattttgttttccccttatataactttatataactttttgtttcgtatataagtttatataaccttatataactttgcatttattatataactttatataacttttgtcaccataaattcttaatctttaaaagcatctttataagatattttatctaccagcgcttcataactgctatcatcagcttgtactatctctctgacattgtgctgctctaatgctgctgttgttttttcacctattgagtatgctgtttccacgtatgcattctccggcagcatatgaaaaaatctttccacatttgatgcgcttgtaaaaacagcttcacttaccatgtttccaatgctttcaggaatactctcatatgcctgctcatttacatatgcatcaattttttctaattcacatatttctttaagccctgcctcaaggtcaggtgaagcctcctttgccgagaaaatgcagactttgatttcatcattatcgcccatatacgaactcaattctcctgcaagtccttttccggtctgttctgccggaataatatctgcatttatgtgatgctttacaagctctttttctgtagcttttcccaccactgcgaaccttgcatttgctataagcctgatgtctgcccctgccagatccagattatagaaaaatgatcttacaccatttttgcttgtaaaaactatccagtctgctgatcttaccttatcaacaaatttaggaattataactggtttaattatgcctgtcttaaccggtgtgatgtctgctccaagctgctgtaattttgctatcaattcgtttgttttgatatacggtactgtgatctttcttccaaacagcggtcttttttcaaagaaatcaagcctgtcattcagtgaaaccacatctcccacaacgattatagccggtgatgtcagctttgcttcctcaatcttttctccgatatccgcaagcgttcctatacatttgcgctgcgcggcaagtgtgccgttcgatatcactgctgccggagtatccgctcttcgtcctgctttcataagccctgctgcaatgctttttacatgcgcaagtcccatcaaaaatacacaggtgattgtctcatctgtaagaagggaatagtctatatctgcctcctcatcccttctgctgtgcgcagtgatgacctgaaagccttttgctatgcctctgtgtgtgataggtattcctgcagccgcaagcgctgcaaccgatgaactgacacccggtaccacttctacctccacatttctatctaccaggtagagagcttcctctccgcctcttccaaagacatacggatctccgccctttaaacggactacaagctcatgatattttgatttctcgtataaaagctcgtttatggcatcctgcttcatgacatgcttgtgattttccttgcccacataaataagctcacagcctgcctttgccattgaaagaaactctggtgatgatagcctgtcatacaccagacaatccgcctgttttatatatttttctccttttaaagtgagcaggcccgtatctcccggtcctgctccaactaatactacttttcctgtgttttctctcatgattttcctaattatttttctactgaattattatgattaaaaattatgacttgatattttttagtcgatttctaatttataccgaatatcgtgcacggcacgctccacaatattgtttctgtctgatgtaatatcccatacctgctctgtccttgcaagctgtcttccatcctctgagccaaacatcgcaagaagctttagcctgttatttttgtcgctgtcattaccgcggactttttcacttacaatatcacagtatgcagccacaggcagatggcagtttccaccgattcgctttaaaaattctctctcaatgcctgcgcacagattggttttctcatctgacaaagcatcaagctttgccatcagcttagcattgtcagcacgtagctcaagcgccagtgtgccctgtgccggagccggaatcatatcatcctccgaaaagtactgtgtgatctcagaatctcttccgatacgctttattcccgccgctgcaagtacgattccatccagcctgtattcgttatacttattctgtttttcgttagctatctcattgttatttacagtattatcggcaacctcttcatatataatttcaccatcatatagcttacgaagcctcgtatcgatatttccgcgtatgccaaccaccttaaggtcaggacgcagctttaaaagctgatactttctgcgcttgcttccggttcctatcacggcaccatgaggaagttcatccagtgaagcggcattttttagcaccaaaacatcccttggatcttcacgcttccatgcctttgcaaatgtaagccctgctgccggttcatcaggcatatccttcatggaatggactgccatatgaatctttcccgataaaagctcgtcctctatctcctttacgaagataccctttgagccaatcttatcgagtgcctttttctgctctaaatcgcctgttgtctttatgataacagccttaaaatcatcatccggatatgctctttttaacttatctatcacgtaatcagtctgaacaagagcaagctttgagcctctcgttcctattaaatacctcattttactctcctacggatcatgccattttccatttatcatttataaatgaacaacaacttaaaatctgtaataccatactttaaactatatttccggaatccttccattatcaatagctgcacacaatatttctttaaacacacgctttctctcggcttgagtgtcatattgcgctattactttttcgcggatctgtcccatgtattcgttcagctcaccaagaaacggagtaagaatctcctgctctttgtctttcagatactgagtcagcacagggctgtttcctccgctcgaaaatgccgcaacaagattcttttcctttatgtatgacggaaaaataaagctgcaatcagccttctgatcgaccgcatttaccatgatgccattagctttgcaatactctgcaatctcatgatttaaagcattgtcatcagtggcagcgataaccatttccatgccgtcacagtctttttgattaaactttctttttataatcgtaattctgtcagctgcatctgaatccgtcttattgttttctatatttgccgtatatgagccctttttatccttgcttgctatatcatcaattgtaagctttctcagctcatcacatatatcctctgccacaaccgtgacctttgcgccaaaatccagcattacgatcaccttgcggtatgccacatttccaccgccgacgatcagacactctctttccgtcatatccacaaacatcggaaaatacgccatttttatctccctgtaataccatatccatactttatttcatatattatttcatgccttattttatactttattatacgctttatgctttattttttgccttatgcttcacactgtatccattgagcattccttcaaaaacaggacgaagcttagcagaaaacactgctgccgatacgcataatataaagtccggtgcaacagttatcagacagtaatccactattacgatgccccagctgacaggtgttgccgcatagaaatttttcatgcagtaaaagtatattgctccaactgtataatatgccaccagtccgaccgttgccggaagaatgagtgtaaacgcattggtctttttaagcttttctgtgatagctccgattaaaaatgctgcaagcacaaagcctaagaggaacccaaagcccggtcttaaaatgtatgtaggaccaccacctgccgcaaatacaggcactcccaccagtccgatgcacaaatatactatcacgctaagcgatgccagctttgccccgagcagaaatcccgccatcagcacaaagaaccactgtaatgtaaaatgcatggtgtacataggaagcggaatatcaatcttgataaatgctccaactgctataagtgccgcaaaaagtgcacatgttgtaagttccttcgtttttaatttcattttcgcgcgctctttcgttttattaaatatacatgctataataacatctttctctaaaaaagaaaagccatcttcgatgaagctgacttttctttgcagctttcgctgcgactcaaaacattaacatatgatttagaagtaatattcatcagaatatattcgtaaatcctctttcgtgacctgtccaccctcgatatgaaacgagttgattacaggattttctgccataagcgacattatcatgtagctcgcatttggatcatatgcaagctttatatcctcatctgatggccttgaagggctagacggatgtgaatgccagttgccaagcggcttaaggccgtttgctctcatgtcctttatggctgccagctgctcctttggatccattgtgaaatgatcctcggcatggtctgtattcgtcaggtaatatacctttgtgatgagacgaccgttttcgtcctcactgcctgctatcagaccgcacgcttcctccggcagatactctttagcatattttgctatttcatccagaaacggatatttcattcttatgatactcatatcgttcctttccttactgtctttttattcctgtgtacgaggtgcatcaaatctgcccgctgtctcctcgcagacctcctgctcgtagtcgattggctcgagaatggtcggatggtcgccacagactgcacagttgtgtgtatcctttggaagcttaatcttgtggaactccatggtgagtgcatcatatgtaagcagatatcctgtgagcagctctccaacaccgattaaatacttgatagcctccatagcctgaagcgaaccgattactccgcccatagctccgataacgcctgcctgcttacatgtaggcactgcatcctttggtggcggattcttgaatacacatctgtagcaaggtccctctcccggcacatatgtcatgagctgacccttgaaacggatgattcctgcatgtgaaaacggctttttctcaagcacacatgcatcgttgattaagaactttgccgggaaattgtcagttccatcgatgatgaaatcataatccctgataagctctctgatgtttgacgcatctacaaacatacggtatgtattgacctgaacgtccgggttcatggcattcattgtctcttttgctgactttaccttggcttttcccacatcggctgttccgtggataatctgtctctgcaggttggataaatctacctcatccgcatccacaataccgattgtgccaactcctgctgctgcaagatacatggctgccggagctccaagtccgccggcgccgataataagcaccttgccctttaataatttcttctgacctttaacacccacctcattaaggataatgtggcgtgaatagcgctcgatctgctcatcagtcattgccattagcatccacctcccatgaagtaaaggaactctacattgtcgccatctttaagcactgtctttggcttatcatctgtggcaacaaattcctcatttattgaaactgttacatactcaggcatatctacattctcaagctcgataagctccggtaatgtaagtccatccttatattctttcttctctcctgctactgtgatagtcattttatttcctcctgtgtcacagattgtggtatctgtatgtgttattatcctgtatcagactgctttatataataatctaaagactataataattcttcaacccatgctttcaaatcggcaggcttttgtgcgccgacctttctgtctaagacctctgcgtcttttacgaaaagcagtgtcggattcgcagtcacctcatactcatcagcgagctctccgtcaaagtttgtgtttaccttgtatacgtgaagtttatcctcataatcatcctcgatatctccgagaaccggtgccagcttcttgcaggccacacatgaatccgagtaaaaatcaacaattaccggaagcttgctttttaatactttttcatcgaaatccgcctttgaaattcttgctgccat

SEQ ID NO: 1123 - DNA, 25080 bp, unidentified
  source 1..25080: mol_type = unassigned DNA
agatcttttcgatttcaaatgcagatgcagccttcagaagattctgaacctggacaccatactttccaacgattccaaaatagtaacggcgtgcctcacagtcccagtcttcctctacatccaatgcaccgaattttccaaatccatccgctgagaacaacaccttatccgtactgtcataagtcaccataacttccggccagtgtaccatcggggcgaagacaaacgtaaggatatgctttccaagttccaacttctcctggttcttaactacgactttctttccctctaaatccaggttgcggaaaaagttggatatcatagtaaaggtcttcgcattgcccacaatctttgtatccgggtatacttccatgaacttctcaatattggctgaatgatccggttccatatgctggatgatcagatactccggttttgctccgtccagtgcattctttacattctccagccattcttctccaaatgcctcatcaactgtatccataactgcgatcttttcatcccggatcacataagaattataagccattccattcggaacaatatactgcccttcaaataaatcgatatcatgatcgttcacgcctacataaataatttcatccgttaccttcatcttctctgccctttcttgcatgatgtattttattcaccttgagtataacgcaattaaaaatatatggcaatcccgtcttttcaggattaaaccatacattcattcactcccgctctgttaatttctctttcagccaaaatcttttctatcagctctttgtcctcaggcggtgcggcccacgccagcccacaccctgcggacagaatccggggagccgggatcagccgtcccggtattcccttttctttacagatcttttccattgccatcgcatctgctgtcgtatgaaaggttacaacaatttttaattccttttttcgcatgagaccactgccccttctcattgcacccaaaactgcaacttattttttcccttcgttttcaaagtattcttttacaagcttcacaacaacccctgataacaggaacactgcaatcaggttcgggattgccatcagtccgttaaatgtctccgcaatactccacatcagaccaagatccatcgtagcaccgacgatcgctaccagcgaataaagtaccataaatggtttattgacttttgaaccaaacaaaaattcaatacatcttgttccatataagccccatccaaggattgtggaaaatgcaaaacaacacatggcaactgcggtaaaaatagaaacccagtttccataagtagaagtaaacccgctgatcgtaagctctgcacctgcagcctcaccataaccaatggaaacgccactgcaaagaataaccagtgctgtcattgtgcagatcacgatcgtatctacgaacacctcaaaaattccaaaaaatccctgcttgaccggtttctgcgtatcagcacatgcatgggcgatcgaacctgtaccaagacctgcttcattagaaaaaattcctcttgatacaccttttttcatactcataaagaaacttcccactgcaccgcctgtaacagaagccggagaaaatgcaccttcaaaaattgatgcaaatacacccggaacattcttgatattcaacaagatcacgcccagtgccagcagaatataaacgactgccataaacgggaccagcttctctgtaacccggccgatcctcttaatccctcctaaaaggatcagggcgatcaaagcggcaagaacaattccgatgatcaggttcaatgttcctgactttcccgcttcaatgactccataattgatcaatgctgaatcgatcgctgtcgtgatcgtattgacctgagttgcatttcctgttccgaatacagtcagcacaccaaacgctgcaaaaagatatgccagccagtgccagttcttcttcagtccattttttatgtagtacattggtccgcctacaagatctccatctgcattcttttcacggaaatgaaccgcaagcgttacttcggaaaactttgtacacattccaaggattgcagagatccacatccagaagaccgcacccggacctccgatagcgatcgcaccggccacaccggctatatttcccgttcctaccgtagctgccagtgccgtacatactgcctgaaacggggtcaacgctccgtccgatgcatccctcttcctgagcattcgtccgattgtcaccttcatcacatacgggaatttgcggatctgtaaaaatctcgttctgaagctcagcagcagaccaactccaatgatacagatcattgccggcacaccccatataaagttgttgacaacattatttactgattcaatcgtagataacattctttcattcctttctcatctgaaactgcggcatcctttctccaagtcagcttccccaaaaactgtcattttacatcaacgccgctttaccttgctaaaccgcagtttaactgttgaattatagcatattttcaccttaaagtacagaatttacataagattcttctcttgagtggcagctctttcctgtgctataatcataaggtcatataaagcagcattttattttgcgtgaaatgcttacagatcagaaaggacttttatatctatgtggattgcagataattggaaagactatgaaattattgactgttcaaagggagagaagctggaacgctggggcaaatatcttctcgtccgtcctgatccccaggtcatctgggacaccccgaagaccgaccgtggctggaaaaatatgaacggtcactaccatcgcagcaaaaaaggcggtggtgaatgggaattttttaagcttcctcagcagtggcagatccattacggttcgcttacttttaatctcaagccgttcagttttaagcataccggtctttttcctgaacaggcaaccaactgggactggttttcagaaaagatccgcaacgccggccgacctgtcaaagtactgaatctctttgcctataccggaggagctaccctcgcagccgcggctgccggtgcaacagtcactcatgttgatgcctccaagggaatggtcacctgggcaaaggagaatgctgtatcttccgggttgaaagatgctccgatccgctggcttgtagatgattgtgtaaagtttgtagaacgtgagatccgccgtggcaacacctacgatgccattatcatggatcctccttcttacggacgcggaccaaaaggtgagatctggaagattgaagacatgatccatccgttgatccggctctgcacaaaaattctgtccaaagatgcattatttttcctggtcaactcctatacaacgggtcttgcacctgcagtactgacttacatgatctccaccgaattaaaatcctggaacggtcatgttgattctcaggagatcggactccctgttacaaattcaggactggttcttccctgcggtgcttccggcagatgggaatcccgttaatttttctaatactggttgcctttttacattgcaaatcatatgaaaaaagcatcggaataaggaatctcttccaagagttttctttccggtgcttttcctttgcttttcctttgcttttctttacttctcttttttccggctttctgattcatcttacttggattgacccaagaatctccccaataggtgctgcaatgctcagttctgcccggactgctttctccgtgctggatttattgataacaaccaggtgctttccccgaaaataatcaataaaccctgctgccggatatacaaccagcgatgtgcctccgatgatcagtgtatctgctgaaccgattgcccggacggcaccatcaatcgtctttgcatccagtccttcttcatatagtaccacatccggcttgatctcgccgccacaggaacagtgcggtacaccttccgatttttttacatactctgcgtcataaaattttccgcatttcatacaataatttctatggatacttccatgaagttcatatacttttttactgcctgccgcctgatgaagaccatcaatattctgcgtcacaactgcctgaagctttcctgctgcctcaagctctgccagcttcagatgtgccgggttcggctttgcatccaacatcatcatcttctctttataaaattcataaaatgcttccggatattttataaagaaactatgactgacaacctgctcaggagagtacttgtatttctgatgatagattccgtctgcacttctgaaatccggaatcccgctttcagttgagactcctgctcctccgaaaaatacgatcctgctgctctcatctataattttctgaagttccgctatttccttttcatacatcttttctttcctcaccacatacagtaaatgcggtacatacttcatgtaccgcatctcctggaaataatttttatgtatcttacagatctactcttccggttgtatcgccattgacaacataatatgctgctgactcttccggtttcagataaatcttgacatccttcatctctccgacttttctcttaagattctttgtccagatctctttcactttctgaaggatctctttttctgtatattccttacctgcaaactgaaggaacatctccgtcttaagctctgcctttttggctgttgacttcttcgctgctgtcttctttgctgcagtctttttcactgctttatctgctgcctttgcagtagcttttacagctttttccgctgtctccgcaactttctttacggctttcttcgctgtctcttttgctgcagtctcttctgtctgaacttccggtgtatccactaatactgctgcctttgtctcgagcttcattgtagaatctttcttagtctcaatcgcttttgcagcttctgtctctttcttatcggccttttcttccggctttgcaaccggagtctttgctgctttctcttctgctttcctttctgctttcactgcttttgcttcaacggcttctttaacggctgctttctcttctgctttggctgctgttacttttactgttgaatttgctttctttgataccataatctcgtttccctcctaaattatacacccaagtacaatggatttttcctgctttgtacttgtgaataaattcacagttctatcagattgtaccgcatttttcccaaaacgtcaaattcaagaatttttcctttatttttcttcctctcatgaccgatcctgattgtcagaataactcctgaaaaaagtatccagtcctctcagagtctttaacagtaccggaatttccgtctcgtccagttcctcgatcacagcattcgtcatctgttcatgaaactttgcatgatgcctgtaagcccgctgccccttttctgtcagccagatatagaccaccctcctgtccttctcaccacgttccctcaaaacgtactttttattgaccagtgcattcattgccgtcgtaagtgagcctgctgtgatcttcattttttttgccaccacagacatcgtcgtctttccggtcagaccgattgcctcgataatatgcatatcattgttcgtaatatccttaaactcttccgttatgatcgcatttttttccagttcccatatttcattaaataaatgtaccagaatatcattgatcgtctcataggttttcattcctgatttccctcctccgccttatcatcccggtgcatttatccgtcatttacagctttctgaaacgcctgccgttatctgtccgctacagctttccgaaacgctcgccccatcctgtccgctacagctttctgaaacgctcgccccatcctgtccgctacagctttctgaaacgctcatatcttccttccagcaagtctttcgtttccagcttctggtattttgtcagaaactctgccagacctgcccgcagcagttctgcagttggtttcatcgtcaaaacactgaagttttgtggttccgggaatactctctcgatcacccccagtttcttcagatcggctgctgtcagtttcatcatctttgctgcttcagccgaccggctgctgtccttccataaaatgcttgcaaacccttccggcgaaaggacagaatagacactgttctccagcatccacacttcatctgccaccgccagtgccaatgcaccaccacttccgccttcaccgatcacaacagaaagtaccggcactttcaatcccgacaattcaaataaatttcttgcgattgcttctccttgcccgcgttcttccgcctccattccgcaaaatgcacccggagtatctacaaaattgatgaccggacgatggaatttttctgcctgcttcatcagccgccgtgcttttctgtacccttccggggaaggcatggcaaaattccgttccagattttcttttgtcgtcctgccttttgcctgtgcgatcaccgtcacacagattccctgaaaatatgcaattcctccaatgatcgccggatcatctctgtaatatctgtctccatgtaattctacaaaatcttcaaacaaaatgtcaatataatccttgccgaccggacgctcttttgaacgggatcggcagacccgctcccatgccgtaagagatttttcagaccatggttcctgttctgctgctttctttcctgcttttttttctgtcattcctgcctttgggaccggttctgttctgtcggattttctgacctcttttccctttctgcaatccgggtggacatgatcatgcattttcaggatccttcccaaaaccggcttcatattttcccgctttacaatctgatctacaaatccatgttccaaaagaaattctgcccgttgaaatccttccggcagtttctccccaatcgtctgctcgatcacccgcgggcctgcaaacccaatcaatgcctgtggttctgctattataatatctcccaacatggcaaagctggctgtcacgccgcctgtcgtcggatctgtcagtaccgtcacatataacagtcctgcatcgctatgacgttttaatgccgctgaagtcttttccatctgcatcagcgaaataatcccttcctgcatcctcgctccaccggaacaggtaaataagatcacaggaagtttttcatttgtggcacgttccaccgcccgggtgatcttctcaccgactgcataccccatgcttgccatcataaaacgcccgtcacagactccgatcactgcctgccttccgttgatttttacacgcccggtcacaacagcttcttttaatcccgtctgttccctgagtttctttatcttttcagaatatcctttaaattgcagcgggtcaggcggaccgtccattccatccagatccatatcccactcttcaaaacttccttcatctgcgatcatttcaattcttttgtatgcaggaactctgaaatacccatgacatttcgggcaaatatatgctccattgatcacttcttccgacaggattgccgcaccacatttattgcattttttcaaaagcccttccggtgcttccggtcttcttcttaaacgcccctttagtacaggattctctctttcccctgtctttttaaacatattctgaagtctcatttttactcccttcttccgtccctgcatcacgaaattcctgcttctttatgccaaaagtccttttgcctctgtaacaaattccacatcaatatttcctgaaataaaatcagggtgatttaagatcgaatactgataatctatattcgtttcaacacctttgatgatcacttcccctaatgcacttttcattttatggattgcttcttccctgctgtctccatgaacgatcagctttgccagcatagaatcataacagggcggtacctgataacctgtataaaccgcagtatctacacggattccttcccctcccgggaaatgcacatctgtgatcgtgcctggtgatggtctgaaattcttcatcggattttctgcattgatcctgcactcaatggcatgtccgctgatacgcacttctttctgcttcatgccaagtttctgaccatctgcaatcctgatctgctctttgatcaggtccaccccggttacccattccgtgaccggatgctccacctgaatccttgtattcatttccataaaataaaatgctccgctcttttcaagaagaaattcgatcgtaccggcatttctgtagcctgctgcctttgcagcccggacagccgcctctcccattttcttacgcagaccggtgctcagtgcaaccgatggagattcctcgatcattttctgatggtttctctggatggaacagtcacgttctcctaaatggatcacattcccatagttgtctgcaagaatctgaaactcgatgtgcctcggatgtttcacaaaatgctcaatatacatcgtttcatctccaaaagcgatcccggcttctttccgtgctgtcagaaaactctgctcaaattcttccgggttctgtgccacacgcattccctttccaccaccaccgagtgctgccttgataataaccggataaccgattttttttgcgatctttgctccttctctcacatcataaacggcttctttactccccggaatgaccggaactcctgcttttatcatggtatttcttgcctcggatttatttccgagccggctgatcacctccgatggtggtccgatatagacaatattacactgctcgcacaagcgggcaaaccggctgttctctgaaaggaatccaaatcccggatggattgcatccgcaccggataccagcgtcgcactgatgatgttctgcatattcagataactttctgtggaaggtgccggacctatacatactgcttcatccgcaagctgtgtatgcagagcatcccgatctgcctctgaatatactgcaacggtacggattcccatctctctgcacgcccggatgatccttaccgctatttcacctctgttggcaatcagtatcttttcgatcatatcttactctcccatctgaaacttactaatgctaaaagctattcgcctaccataaaggtaagctctgctgtcactaccgtctttccatctactgatgctgtcgcttcaccgactccgaccggaccttttcttttgatgatcttcgtttccagacgcagcctgtctcccggcaaaaccattcccttaaaccgacacttctgaacgcctccgaaaaatgcaatctttccccgattttccggcagacttagaattgcaactgcaccggtctgtgccagtgcctctaaaatcagcacccccggcatcactgctttctgtgggaaatgcccacggaagaaatcttcatggtaggaaacacccttgtatcccacggcatattctccaggcacgtaatcctcaatctgatcgatcagaagaaagggatgtctgtgcggaataatctgctgaatctgttctgtatttaaactgtgcatcgttctgtcccgacctttcctgttatccaactgcaaaaagtggctgtccatattctacagactgaccattctctacaaaaatttctgtcactgttccttcaaaatctgattcaatctcattcatcagtttcatcgcttcaatgatcgctacaatctgacctttttccactcgatccccgactttcacaaatggttcttcatcttctgcaggagcagcatagaacgttcctaccagtggtgctgtcacaattttcccctttttctgctccaatccgtctgcctcatttttatttaatatggctttctgctgcacaatttcttccatacatgacacctcttctatctgctgtgcagactgaattggctgtagtttctttttcagagaaatttctgcattttcatctttatattcaagctctgtaaggttcgactctgatactgcatcgatcaactgcagcagttcttccattttcatactcatgctctactcctcatagcgttttacgatcagtgacacattatgaccgccaaatcccagggaatttgacattgcataatcaattttcttttccaccggagaaccaactgcataattcagtccacattctggatctatatgctctgttcctatggtctgatggataaactgatcctcaatactctttacacatacaatcacctcaacagccccggctgcacctagcatatggccgaccattgattttgtagaattgatcactaccgtttctgccgcctttcccagtgcataacggatcgctcttgactcaaacagatcattatgatgcgtacttgttccgtgtgcattaatatagtcaacctgctctggctgtattcctgcttctttcatggcaaacttcatcgccatgcctgctccggatccgtcttctgcaggggaagtaatatgataggcatcaccggttgatccgtatcctgccatctccgcatagattctggcacctctcgccttggcatgctccagttcctccaatacaacaattccggctccctctccgatcacaaatccatccctgtctttatcaaatggccgggatgctgatgccggatccggattacaggacaatgctgtcaaagctgtaaatcccgctacaccggaaggacagatacttgcttctgttcctcccgccacgcagacatcaagatctccatactggattgcccgcatagcatctccgatgctgtttgcccctgaagcacaggcagtcactacatctgtacattttcctttcagtccaagctggattgatacatttcctgccgccatattggagatcattaacggaatcatcaatggattcacgcgtcccggaccacgctcctgcagttttttataatttttttcatgacactccaggccaccaattcctgagccaatgattgtcccgatacggtagggatcttcctctgccatatccagtcctgcatcttcaaatgcttcttttgctgccgccactgcatactgggaaaaagattccattctttttgccgctttaaagtccattcgttcttttgcgacaaaattctttacttctgctgcaagttttactttatattctgatgcatcaaaatgtgtgatgggagcgattcctgattttcctgaccggattccatcccaaaattcctctatggtattcccgatcggtgtcactgcacccattcctgttataactactctgcgtttcatttcttttcctgcctccttctacattgccatgccaccgtcgacatggatcgtctgtcctgttatataccgggcagaatcagatgcaagaaatgcgactgcttctgcaacatcttccgctgttccaaaggctcccatcgggatctgtgccacagcggattccctgactttttccgtaagaactgctgtcatttctgtctcaataaatcccggagcgactgcattgacagtaattcctctggatgcaagttctcttgcagcacttttggtcagtcctatcacgcccgctttggatgccgagtaatttgcctgtcctgcattcccaaggattcctgaaactgatgacagattgatgattcttccgcctctttgtctgagcatctgccttgcagcaaaccggatacaatggaatgtccctttcagattggtatcaaggactgtatcgtaatcttcttctgacattttcatcagcagaccatctctcgtgattcctgcgttattgaccagaatatccagtcttccaaagtcatccgttacttttctgatcattgcttctgtggcctgataatctgctacattacactgcatgatctctgcaattcctccgtcagattcaatttctgctttcacttccttggctttctccattgaaccatggtaattgatcacaactgctgccccctctgctgccagcttcaaagcaatcgctcttccaattccccgggaggctcctgtcactaatgcaacttttcctgtcaatgtattttgcataactcatttaccacctttttcagatcttcgactgtactgatattatatgtccgaacttctctgctgatctttctcataaatccggtcagtgttcttcccggaccgatctctataaaagtatctacaccctgactgagcattttttctatactctgctgccatctgaccgatgccgccacctgctttgcaagaagggcttttgtctgatcgatttctgagacatattccgctgtaacatttgtcacatagggaatttgtaattctgagagttccacacttttcaattcttctcccagctcttttcctgcttcttttaataatggagaatggaatggcccactgactttcaacggaagaattctttttgctcctgctgctttcagccgttctgctgccttttccaccgcatcgttccaaccggtaatcacgatttgtccgggacagttataatttgcaacactcacaccttccatcgatgccaccgtcttttcgacgatttctcctgaaagacctaacactgccgccattgcaccttgtccatccggaattgcattctgcatcagaagtcctctttttcttgtgattcggattgcatccttcagcttcattcctccggctgttacgatcgcacaatattcacccagactcagtcctgctgtcacatctgccacaagaccttcttcctcagcaacacgctccatcgccatgcagactgtcacaagtgctgcctgtgtatattctgtctgatccaatctgtcattttcttcaaaacaaagctttttcatgtcgatgccaagcaattctgttgcctggtcaaaaaccatcgcagccgctttgtactggtcataaaaatcttttcccatccccactttctgtacgccctgtccggggaaaataaatgcaactttactcataaaattctgttcctccaagcaatgcatctgtctcctgcaccagcttttcgattacctctttgcaggacattttttctttaatcatccctgcgatctgacctgccatgacacttccattttgaacatccccatcaacaaccacttttttcagtccaccaagcgtcagtaactccagctcttcaaacgcagcaccttcctgctctttctgtaaatatgtctttgtcatctgattgcggagggctcgtaccggatgtccggtagaacgtcccgtaaccctggaatcaatatcccttgctttcagaatacagttcttgtaattttcatgtacctgtgcttcttctgttgcaacaaagcgggttcccaactgaactcccttcgctcccagcatgaataccgctgcaacacctcttccatctgcaatcccaccagctgcaataaccggaatctgaactgcatccgcaacttgtggaacaagaaccatcgttgtattttctccgatatggcctcctgcctccgttccctctgcaacaacagcatctgctccacaccgttccattctctttgcgagggcaaccgatgcaactaccggaatcactttcactccggctgctttccacattttcatatatttttccggagatcctgcaccggttgtcaccaccggcacagcttcttcaacaattacttttgctacttcatctgcatgaggactcatcaacataatattcacaccaaaaggcttcttcgtaagctcttttaccttctgtatctgttcccgtacccattcagcaggagcatttgctgccccgatcagaccaagtcctcctgcctccgatacagccgcagccagatgatattctgcaacccatgccatgcctccctgtataatgggatattcaattccaagcagttttgttattgatgtcttcattttgaattcctctttcttatttgtgactttctacataagaaaccacgtctccgaccgttttgatttcttccagatcttcactcggtatttcaatttcaaatgcttcttcaaacgccataaccagctcaaaaagatccagtgaatctgctccaagattctccttgaatgaagtatctgttgtaagtgtatctgcctccacatttaatgactctgctacaatttccttaatctgctctaacatttttatttcctctcttttcttttcattttttctatgtaataaggaaaagtatccttttcctgactaccattcaaataagcaccctgcccaggtcagtcccgcaccgaatcctgccaaaagcatgctctgcccttgctttaaaattttcatccggttcatttcatccaacaaaacagggatcgaagctgccgaagtatttgcatatttgtccaaattcaccggaaattttgaatctttcaggttcaatcttctggcaacagcttctataatcctttgattcgcctgatgcaacacaatatgatctatctcttccggcctgatcccggcctccccggtaagttctaaaatcaattccggcactttgcgtactgcaaatttaaagacttcctgaccattcattttaaggaacgactttgtgcttcccacaagagcttcgccctttgtcccgtcagaatgtgctgccatatggcaataccccttctcttctgcttttaccacaactgcccccgctccatctccaaataagatacacgttccccgatccgaccagtcaaccatcctgctcatccgttctgccccaatgaccagcaccgttctgcatataccggaatggatatacgcctgtgctgtatgaaaggcaatcacaaatccagaacatgccgcattcacatcatatcccactgcattgactgcaccggtcattttttggacttcacatgccgtacatggataaaccgtttctgatgaggaagttgccacaaggatcatatcaatctcctccggttctgtcccggcattttccaaagccttcagagccgccattgaagccatataagacgtggtctctttctttgctatatgacgctgtctgattcctgtccgctcctgaatccattcatcactggtgtctacagattctgccagtttaaaattatctatgatatagtccggcagatatgatcctgttccacatatttttccaatcatttttttctccaactctcttaaaataatttgagtcttaaatactttgacctccaaagtatatcacaataaaaaaatatgtcaacaaatttttttcatttttatatccacttaatccacagaattttttaatgtaataccatatacagtatttatttgcaacggatcactttctgcaattttcccgtcataatatactacaacttcatcaccgacagatacctctgcatagttgtcccgatttttttcatttaacgatactttacacctcgttccatcaggatacccttccttattaatttcaagcagaatagaattatcctgtacttccaggacagttcccgtaatatcaggcttattttgcagatttctattcacattccgattgctgcagcctgccagattcaacgcaataattaatattaaaatgaatgatgtccactttttcaaacttttctcctcctcccggtagcccttacgaactctgatatcggaaatacaaaggtgcaggacatccggtggatgtccgctttgcaccgaccgcagcggcagcggcgatccccaaaatctgataacacattataacacaaaattattcataagtgaaagcagagtatcctgctgttcttataattttgcacaatctattataattttctgacacagatcataccctaacacagaactgttcaaagacatggtatagttctctgccattccccatttctgttcggtataaaaattatagtttgttctgcgtcttttatctatatcatttatcatttttatagcatccacttctgtaacattatataagctgcagatacgccggactttttccggtatgcttccatgtataaaaacatttaatacatcttttctgtcctttaaaatgaaatctgcatttcgccctacgattacgcagttttctttttcagcgatttccataattacttttctttgtgcttcatacaccatatcttctactgattttcccgtaatatcacgaccagaaaaagcatacgcaaaccatcctttcttcggagataactcagcattttcccgaacatacgccgatgataaccctgcctgttctgcaatctgtccgatcatttctttatcataataggcaataccaagcttttttgccacttcttcaccaataaaacggccaccacttccgaattccctgctgattgtaataattctctttgccataactgtctcctccttaacttaatctttccactttgttctttcggattttctttaaaaatacatatcccaccagacaagcaataagctcagtaattgggaatgcccaccagatcaatgaaatccccatctgtccgtttctgacaaaagtggagaaaatgcccgccagtggtaatatgactattaactgtctgagtaatgaaatcaccagcgattctataccaccatccaatgcctgataaattccctgatatgctacattaattccggcaaaaataaagctgacagagataattctcatggctccgataaaatattctctggactgtcctgcattaaataaagtagcgaaagcccccgggaaaatttctgtaatcgctacaccaacaatcataagtacaatcgtatagatcaatccatacataattccatcctgaactctctttttgctgtgcattccatatgcaaaagcaataatcgctgtaatcgcatctctcagcccaaaggcaaggaataatacaaactgctgcactttatagaacaacccataggctgtctgtgccgatggactgaacttcaatatcagattcattgcataaaccataatagacataagtgcctgtgcaataattgccggaagtccgatggcatagatttcccggataattccaccatccggtttcatatactttacattatgctcaaattctttattcatctttatatggaatacaaacaacaataccgcggacaccacctgcccgattaccgttgcatacgcagcaccttccactcccatttcaggaatcggtcctattccatagatcataattggatcaagaataatatttatcactgctcccacaacctgaccaattgttgaataaagagaacgtccggttgcctgtagcagtttttcaaataatgagaaggaaataattccaaatgaaatgatacaacatattctcagatagctcgttcccattgaaacaacctccggatcaactgtctgtgatgagatgtatgcttttactccaaaaattccaaataacaagcatattgcataaatgattattcctaaaaataagctgtttcctgcaacttttgcagcctttttctcatttccctgtcccagggttctcgcaagaagtgcattagtccccacaccagttccaattccaaccgccaccattagcatctgaacagggaacacaagtgtaagtgcattaagtgcagcctcacttcctcttctcatgtttcctacaaacgcactgtctacaatattgtaaacagcctgcaatgccattgataagatcatcggtattcccatctgtaccatgagcttatttaccgacatttctctcattttgttaccttcagccatcttaactaaatcctccttttctgcataaaaaaagtgtgaacttatctgataagccggacttacgctgataagctacacactttcgatgatattatatattttaataatgtacgacatcagttgcacaaaaaaacgagtagcaaaactggatttacgctaatctgctactcgttcaaaattcattatattttctttttagtgaaaagtcaaacaaaaattgtcacaaaaactattctcacataaaaactattctttattattgtaacaaaatatcatacaatatcttctacaacgcagttcctttctttggaataaatagatggctcatatctgcatgttccaaattaagcagtgaaatttttttatcaattccacctccatatcctgtcagacttccgtttgtacctactacacgatgacatggaataataatggaaatctcattatgtccaacggctcctccgactgcctgggcagacataaggggaacttttttcacttcagccatccggcgagcaatctctccatatgtgatcgtctgcccatagggaatctgcaataggagctgccacactgcctgtctgaatgttgatcctgctgggtgcagaggtggcgtaaatggggggtcttctccggtaaaatacacatccaaccatttttttgcttctctgagaatctccgtttcctgtaaaattctttcatctggaagtgtatttgcaaaatatttctgtccttcgaaccacaaaccagtaagtccttcttcatcagaagctaaaaggatattaccaatcggggatttgtatctactggcatatatcatatttattcctcaaaaattatacctaagaaatatatcagagtcttgaattacttattgtacccgtctgttctttttatcatcattatatcatgatcgacacctccggtgtctgaagctgctttgcagcgatcatgatcgccattcgccgctcgcactgaaaaagcgatgctttctcctgctcgctaacactcattatatcgtaattcactttattataccccattttatctcctatgcatatcaaattatattccttttaaaaaaataagagaaacgctgtaaattcaacgtttctcctacttttcactaatgccgcagaccggaatcgaaccgtttttcttaatctcaaatactgatagaaaggggctttgaagacttcatcacggttgcggtgttcaaaaagtgttcaaacgtttgtcgcatacaaactaaaaagttgttactttctgcatagtgtattttctaaaatgataattactacgacatcaaccaaaataatccccaatgcaatatatacaaaaaatgcaggcaaaatattttcaagcaagcccattgtcaatgcaagaattgctataatagacattccaattcccattgttctgcataacttcttttcatcatatttttccttttcttcttttgaagccgtattatatccggaaataaaccaactcccgtgtccagaaagtaaaataatagaaaatacagcaaatatcacaaagacaatccacactatccaatcagaacctgttgctaaatctactaatttcatttataagcacctccttaaattccgtttttcttaattcgataaacttgaatttatacccggtacttgtctcgatttatagtcatatcaaccaaatgaaatacaagtaagataataaaaaaaacggaaactattattattcctgcgcccagcttgataaaatcaattataccgccaagacaaaagagcattgcccatgtcttaatccgttttccagtaactctgcatattttctctgtgtttaatccagtataatctcctgataaaaacagcacacttctttctgtattccttgatttgataaaaaatcttccaacaaaaaagagaacagttgccatcagtaaatcaataaatataattattattttcattttcaacacctctaattctaagttcacaacttcaaattgttttaattcttctcagttccaccttctttcccttcggacaagaagtatccctcgctcaaagagctcggtcaattcaaatcttctattgctttcagtctctgctgaagactgaaagttaccttcgctttactatttctaatagttttctcacataatcatctgcgtggtttattgaaaactctccatgatacatattaggaagaacttgtataaaactatcctgcaatttttcatgaatgattttagcggattttttcattgattgcttttctttttctccaacataaatttgaacggttgcttcacactctccaatgccatcttttagtgaatatactgagttttcctgtaaaaaggcaatcatatcactctttctaatagcacaagtatctttgtaatattcatcaaacaaattcgactttattcgtagtgatttgaattgcaattttgaaaaccacttatactttattaagccatagcaacttccaaacgccggtttaatcatagaatatgtaaattttgaaggtatcacaagtacactttccactattgcatacttacatatatctttgcgttgagataaaatttcaagcaaaatctgccctccaagcgatagtcctcccatcattaaaacagaaccgcccaatttgctatttacaaattctataatatccaaagcattattctctatcgttgtaaactgcttatcacatcctgcatgaccatctaatataggcaaaaccacatgataatctgtttgaagtctttcagcaacctctttgtaattccaccatgataaaccgcctccgtgtaagaggataattacatcgctgttttcttttccatattctacataattcaacctctttcacctcactgtaaacttccgattttctcaattctccaaacttgaatttactttaataaatatttttcaaacgctttatgattatcaaagtggacttctctaaaaaacagaactaaccaaataatataggttggtatagctatatatggggttaaaaagcaggataataatgctcctgccaacattataatagcccacataaagcactgatttcttatatcacgagagatatgagctttatcatacaatgcctgttcttctttagaaaatgaattaaatcctgaaacaaattttgctgcttttgccttaaaaatcgcaaataaaacacctataatcagaaatggtattaccaaaattatacacgaccaaaatcctatattcataatacatacctccgcttcaaactttgatttctctgtttcatgttattcacagtataattccattttataaaatattcaattaaaaaggtatgcgaatattttttatttccgcatacccatttatcactttattcttttacatatcgaattaactcaccaatttcacattcaaaatagttgcatagtttacagattaaatttgcatccagtctttgaaattcatttctgcaatatctattgaaatttgaccttgggatatcgagttccttacaaatcatattcttactgatacctttttcttgtaacagttcttctattcttaattctaaatgtccataattcatgttccgcacctctacataaagtatatttattaaatctttatgtagtaattcactatatagtgaggtactatatagtcagtcccttgttaataacacaaaagaggtatgtacatgaaaaagaaaatcatagcaacaatcacaatgctctgtttactgaccgttctctataattatctcagactgccggactatcatattactaacagcatatcctttagcagtgcagataccagagatactgaattgactgtaattgtttacaaatgttgggaaattgatggattaatcaaagacattgaaaatgaacataacaaaatcaatggtacgcctaccaccttggaaatcaagctctattatccaacttattacttgcacaataatagcaaaccattccgaactacaaccattgaatataataaaaaagaatagcactctattactgcttttgaagtagtatcggctattccctctccttatattcttttgttcgtattttcgcaaactaacgttccgcaaggatgcccagtgcgacggttcctaacagggcggcgggtcgactgggcaagtggacggctgaaaagcattttctactcaacgacatatttaacgtttgattctctccgtccctcatatttctcctgtgccaacagtttatcaagaaattctgacacttcttccatgtcttcactgtctatcaaatccagttttatcaatacatcaaggtctgtctgattcttcggttgtattgagatcggctgagatgtatccacaaccactttcaactgttttgtcttatttgctgtttcaatatccgtagttaatcccataacgtggcttttactcacgccgaatatctgtgataatttttcccatatagattcatctctcggcgttccgtttccattttcatagttcgtaagcatactttgtgaaatgcctaattcttttgcaagttccgcaacggttatattcttttctttccgcaattcttttattttattcatagcgaacctcctttataagcacattatatttcatcaaattttccctgtcaatctttttatcggatattcagatattttctattgacattctgcaatgcttgttttatcataagattatcttaatatctgataatcagatatctataaggaggtgaaacgatgattagaggaaatgactttattttaaatccagacaaactgcaagaggaatttcagttagtagaagtttctgactgggtagacttttctacaaaagaaaaatttggattctactatacagttcttcttccaaaattaaagtttgagaaagtcaaagtaggcattaaagctaacacagcgattgttaccaacgaagaacttgaacaaaaagggcagattccagtctcatttgatggattacatacttgggctagtctctataatggacgtctttctgtcaaagcagaagcttccaatatcagaaaagtgggaatgaaataatttccctactatgtcagccagtcagtgccggacaacgtcataggtgctgaactggctgacctctatacttgatatataaaacaacatcttccgaaaacaatcggaacattcattacaaaaatcgggatatgaggtgagattcgtgagcaaaacaaaagagtgttttgcatacaatacgaaaatcattgaaactcctactacaaaagaagtatatatttacgaaaaccctatttttattcactcgaaagaaaaggcagatttaacagacacaagtaaccgaaaaaaatttgatgaaatgtcagctcataagcaatatgacagtttaaaacgcaagcagaagcattacgaacaggctcgttggaatattgcccgtattgttgactgcaactttgataacagaacaaaatttgtaacgctgacatttaaagaaaacattcaggaaatcctgataactaaccgagaatttaagtattttatccagcgattaaattattatttgtaccataccaaaacccagttattaaaataccttgcaacgtgggagaaacagaagcgtggagcaatccattatcatgttattttctttgattttccgtatatagcaaaagaaaaattacagaatttatggtcacatggatttattaaaatcaatcgcattgatgtagacagcaaagaaaacagaggtcgttatcttagcaagtattttggaaaagaccttgatttgaaagaacataagaaaaaagccttttttaaatctcaaaatctgaaagttccacacgaaacaaaagtcatgctgaccgaagacattttacatgacttacaaaaagaaaatatcgtctttcagaaagaatacacaaggcaaatttacgataccaacgctttcttatctactggttcatgcttaaaggacagcagtgttatctacatcaaaattaaaaaagaaaatccttgcgtaaagggggaatcttatggataatcccgttacgttttcagatataacattattgaatacgttagccacctgtgctaacatgaccacagatgaagtcttcaaagattttaaaattatggcaaataaaaaaatcttgaagaatcacaaatatgaaatttattactcggaatcagaaaaaagctggcgtacttatttacccgatgaaaccaaacctaacaaacgccgtcctgttaagaggaagagtaaagagaaccttgaaaaagaaatcatcagattttatatcgaaaagcagaaagctgaaaaccgtcagaatgtcacactagaagaattatatgctgaatggcttttgtataaaagagattatacttccgtaaaagcaaaaacaattcaagaatatgtatctgaatggaatagatttttcaaagatacagaacttgttaaaatgaagataggcgaaatcaaaccaatcacgcttatccgctttttcagagaagctacaaaagaccgacagttcacgcacaagcgagtcagtaatgcccgttctgttttgaatggaatcatgagttatgcgatcgaagaagaaattatatcacataatcctgtctctgatgtgaatttcaaacagtttacctataagccagtagaagtacaaagtgacaatgtattttcccgtgatgatacgcataagttattaaattatcttcggtgtatcatagagccatattctcttgcaatacagttatctttctatctgtttatccgtgttggagaaacaaaagctatccgttgggaagatattgactacaataacaggcttgtatatcttcacagacaggcgacctgtgaacgtacattgaatgatgatttaacattctcaagccgaaaagtaaaagtagtaaatcaaatgaaaggaaatacttctcatggattccgtaaacagttccttacagacgaagcacttaaaattcttcacaaagcaaaggaattaaatccaaatggaatatatgtctttgaacccaacggcgagattatgacaacagacagctttaatcgccgtttgaagaaatattgcaaagaagccggtgttccttatcattccagtcataaaatccgcttttacaatgcttcaacagcttttgacggaaataatcttacaacccttagttatttaatgggacatagtgagacagctacaacattgcattacttgcggaatgtcaataagaggaagaatgacaggcttgcttttcagaatcttggtatttcatcataaagtgttcaaaggtgttcaaacttttagaaacaaaaaaataagagaaacgctgtaaattcaacgtttctcctacttttcactaatgccgcagaccggaatcg

SEQ ID NO: 1124 - DNA, 12756 bp, unidentified
  source 1..12756: mol_type = unassigned DNA
atgacacaaaaatcaaaaagcagtaaagtagttactctgattcttatgatcctggcaatgaataccatttatatgttgccatacctgatgtatacatactatacaccattacaggaggctatgggtcttattggaagagatgctgactatggtagattattaaacgtatatggtattgcaaacgttattttatacctgccaggtggatgggtagcagataaatttgactgcaagaagttacttgtattttccatggtttcaacaggtgttcttggtctctgggaagcaacattcccaagctacacaatcctgttactgatccatatattatttgcagtaacaaccgtacttacattctggtcttcttctgtaaaatgtgtcaacatgctcgctgaggatggagaacagggcggtatgttcggaagcctggaagcaggacgtggtgtttcaggtctggttcttactattatctttacatctatttatgcagtaaatgcagctgacagcacaaaggcaatgagattaaatgtgtcaattatctcagttgttatgatcgtgatcggtattcttttagcagttttaatgccgaagccaaagaatacagaaaatgcaacaaatgctacattacttgacagtatcaaagcgatgggtgttgcattcaagtgtccagttacttatctgttagcaggtatgatcttctgtggatctatgtgtcttgcatctacaacttattttgcaccatacttacagaacatttgtggattaccggtaaaaatcggtgttttatattcaaactacagcaagatcgttacacagttaatcgctgcatctgcagctggtattttagcaactaaattaaaacgttccacaaaacctatgatcgtagccggtgttgttggagcaggtttatatattgttatggaaatcttaccagcatctacagcagttatgtggccaatgcttgttgtaatgacagttgctcttatgatgatctatgtattccgtgctctgtattacgcaacagtagatgaggaaggaacacctaagaacatcgttggtagtgttatcggtatctcatccttaatcggattcattccggatacattctacacatcattatgtggtaaatggctggaagctgatcctgtaggtggatacaaaaagatcttcttaagctgtattttggctatggtaattggtcttgtttgtgcatttatttccgatagaagaatcgtaaaattccgcgcagcaaacggcaaagagaactaataaaagagaaaaagagagacgtattaaaagtataatttatacttttgattgttaaaaaataaacagagtgtcccggagaaaggacactctgtttattttttatgtaataggatgatgttggtgtcaaaaggtctactccgtaaccttttgacacccgaatcgtaataggaaaatttagctctattacatagaaaagcgtttttaggggtgaaaaaagagagatataaaaaaaagtgtttttaatatctctctgctaagattcttcgtcaaaagcctttgataatattttaacatattcatgtaatactttacaaaaagcattcatttcaccgatagagcagaccttcaacagttctgactgcatcgaggctgttttttttgtgacaaaagcgatataaagggtattcagacgttcaccgtccggagtagtgtatagatgcactacttttgcattaccgggacgcttttcgcggtaaatgtagccacctttttctaggttggaaacaatggatgaaatagttccttttgtccgatgttgtttttgggataaatcacttacggtaatccctggattttgttcaatcgtagataagatagcgacttcgacagacttgatcggacgatcattaccgtagtcacgagttccattttgcatatctgtgaacagcatagcgaacatggaaagatcactggcataggcgatgagattcgtactatccttatcccctgtattgtaatattgtaccatgtatgcggtacctccttgaatgattgcatatcagaataataatgatatatatatgtaatatatcatgagaaaataggaatgacaaggaaaaacggggaaaaacagggaaaaggacagaaaaacatttctatacaagaattaattccaggatcaatacaaccgtacagcagccgacagatacttgaaacagacttgcgccaaaccatgcaccgatcatcccaaaaacgagtgcgatagcacctgcaacaggactttgtgttgcttcgatgatcgcaggaaaagtcatgacggataacgtaatatatggaacagaatataagaaagactggataaattgatttttgatcggttttcggataagagtcagaggaagcacacgggtcgtgtaagatacaagtgccatgacagcaatataaaaataagggttgtgtgtcataaaaaaactcctttcgatagtgaagacagagtgaaatatatgtaatgtttcaatttaggtagttgcatttttatctttttccggggtgaccgggaataggatcgcagcagcagaagacaggatcaccgtcaaaagaatggtctttgttccacttgaaagagaacgggttcagatagccggggcgtgcaattgtgatcccaaacagcttgtcggtcacatcataggcgataaaaagccgatggataaaaggggtgtcttccgagaagcgttgtgcaagtgcacagctcatcaaaagataacgggcattggagattagcgtgatgatcgcaacttcaagataagtggcatttgctgcgatcagtgtaaaagcagcatattcacctgctgaggcgttattgaggaggctggcaagaaatccctgtaaaggattcagaccggcattccttgtggcgattccaagagaaaaggataccgcaaaataaccgagtgcgatcggaaatccgtcccgcattccttcggtgaaaactttccggctgaaagtatagaccggatgttggcttgttttgaatgtctgtatattgtgattcataaaaattctcttttcatcaggttgttaatatcaaattaactatgtggaagagatgatggggaaatttgaaaaagataccggaacaggcagatttttcaaagattttaagaaatatcatgggcttccggttcaggatgccattttctttaaccagagtgatctgatctgtgatatggcaaagcacgaggactttattgttatgggaagatgtgcggacgttgtactcacgaatcatcatatcccacatatcagtattttcatcacagcatcgtttgatcagagtgtacgccgtatgatggaaataaacagcttaaactacaagcaagcggaacacctgttaaagaagttagataaacgccatgaacgttattatcatgcatacaccggtaaaaaatggggtgatgcggtcaactatgatctgtgtattgacagtgcaagttacggaatcaaggaatcggttgagctgatcgagcgtatgatcaataagtatccgaatagttaaaaaataatttcatatatgtaaacacattgcacaaaaagtagtgttttttttctacactttagactctaaaatatattgactttagtttctaaaacgagtatgcttttattaagataaaaaatatttcatttaaggagaaaaaagtatggcaaacaaagaaatcaaaacagagcaggcaccggcagcaattggtccatattcacaggggatttcagctgaaaacatcgcatttgtatcaggacagctcccaatcgatcctgcaacaggagagtttgcaggtaacgacattgcaagccagacacgtcagtccctgaaaaatgtgcaggcaattttagcagagaatggtatgacgatggcagatgtgacaaagacaacagtacttcttgctgatatcgcagaatttgcggaaatgaatcaggtttatgcagaattttttgcagaaccatttccagcacgtgcagcatttgaagtagcagctttaccaaaaaatgcgaaagttgagattgaggcaattgcagtaaaaagataagaggaaaatgaagatgagcgtagattttaaccgtgaggtcgatcgtagaagtacaagtgatgtgaaatggcgcccggaaggattaaaggggtatcttccgatagaagtttcggaaaatgagatcccgatgtggatcgcagacatggattttgcatgcccggagtgcatcgtaagagccatcaaagaaagagccgataaagagatttttggttattgctcttataagcaagagtattatgatgcattaacctggtggtttgataagcgatttggaatgaagatccatacggaccttgtttccatgatgccgaccgttgtcagtgcgatcaatgttgcaatccgtgcattcagtaatccgggagataaagttattattcagcaacctgtatacgatccatttgcagaactgatcaagaaaacaggaagagtaatggtgaacaatggcctgatctgtaatgatggactatatgagatggatttcccactgcttgaagaacaggcagcagatccggatgcgaagattatgattttatgcagcccacataatccggtgggaagagtctggacaaaagaggagcttgcccgtgtcggtgagatctgtaaaaagaacaatgtccttgtgatcgcggatgaaatccacagtgatcttgtatatgcaggatatgttcacacaccgtttgcgctggcaagtgatgcaccgcatctggtgtgcacatctcttggaaaaacctttaatgtagcaggacttcgccttgcgaatattttcagctcttcagcagaactgaaaaaacagtatgatcaggagattgatgcttattcatacagcgcatccaatacatttggtttggagatggtacaggcggcatattcaccggaaggagaggcatggctggaagaattattagtttaccttcagggaaatgtggaggttgtttcagagtggtgtcaaaagcataatgtaggatttacagcaccgcagggtacatttttatgctggctggatcttgccagtgccggactgacagacgaagagattattaagaagattattatgggaaaagaagtgatctgtgtaccgggaccatggtttggcaaaggcggcgaaggttatttaaggctgaatattggcggaatacttctgcacagggttctccatcttcagaacaacgctggtagaggctctggatcggatcgcttctgtattagataactaatttcagaaaagaacataaatgcagctttgtagaacaaaaggaggagggtttttatgctgacgaatgaaataattcgcctgcaggcagaagcacagcaggattatgtgattgaaagccgacgtaccattcatcgttttgccgaagtaagcggtaaggaattcaagacaagtgcttttattgaagaagagattaaaaaagccggtctgccttatgaaaaagccggtgataccggttggatcgcaattcttgacacagggaagccaggatcacgtattgcgctccgggcagatattgatgcgcttctggtaccggaggagccaaataaccttgcaggtcctcgtgttgtagtgtccgatgacccacatacgagtcatgcatgtggtcatgatgcccatacagcaatgttattaggagctatgcgtgttcttgcagagcaacgtgataatctggcaggcgtgatctatttctgctttgaagaaggagaagaggatggcagaggaatattggctatgttaaatcagctcagcgcccatggtgtggacgtttgctggggaatccatgtgtatgcagggcttgaatccggaaagatttgtgttagtgccggtccacgaatggctggtgctgcgggagtcggcattaaggttatcggcagagggggacatggctccagaccggatatgtcggtaaatcctgtattttgtgcagcctctattctgaccaatacagcgacggcctgggtcaatcagattactgccggaagaacggttacgttaggtgtgaccagtatccagggtggtgaagcaccaaatgtcatcccggacacagcggatatacttggttccctgcgtttcttcaatgatgaagaaggagaaaaagctgtccgaatctttaagaatgtagcagagcatacggccgcaatgaataattgtcaggtacaatttgatgatcgtttctgtgttttatgtgcgccagtgatcaacgatgagtattattcaaatcttatttccgctgcattgccggaggtacttccggagaacgtaacggtttcctcttgtgagccatggtatgcatcggagtcattctcctgctatcgaagaatttgtccgagtgtactggcacaccttggaattaataatccgtcctacggttcgggtgcagcacatcataatggtttctttgatgtggatgaaggagtattatctaccggtgtgatctctacactgaagtttgttgcaatgctgcaaaaataaaaaatcatacgcagcaaaatagcaagtgctttactgctgaatgaacattaacttactgccgtaaaatgtttccttgcaatttttggaattgtctgcaataattctatatgcggaggggatagagatgaaggaacagcgtatcaaattaatcggaaagttattacatcagcagggaaatacagcaagagcttttgtacagtatatggattcagaccgtgagtatacggcaggtgataaactctacatgagagaggcacactttgtgatcgcgatcggtcccggtgaaggacgtactatgtctgagattgccagagagatgaatgttacacagggggcagtttcgcagatcgcatcacgtctggagaagaaaggatacgtctgtcgcaggaagaatgaagaaaacaaacggcagatcattgcgtttctgactgaaaagggagagcagttttacacagagcaccagcgatacgacgaaagtatgcacaggcagatggatgagatcgccctgaacaggttcaatgaggaagaactacagtgcatctttgaatatgaacagatcatggaaatgttgctgaaagaagaagcgcttacgcggcatttgacagagaaaagtaaaaattaaaaattttgaagaaaacgaaaaagagccggatatctgaattttgagatttaatctcataggatatggaaggctctttttttatgaaaggattcgggtgtcaaaagattttttacgagatttcatgtttcttccgctttgaaagcgtccaatgcctacaaaaagaaaggcgttccagtaatggaaattttccagtatttgtttctgctgattttttctaacagaagcatgtacatgaaactgatcacaggacggaacactcttgattttgcgaaggatactgtatatcgttttatgaaaatgattcagattaactggatccgtttcacaacaatactttcaacccgaatcatcaaggatgccattcttcctttggattctgaggatcgtgcaaatgttcttatcattgatgattgccagactgaacttcagacagcaggagccgactcatattatggagaacattgtttataatgagctgcttgtgcgtggttacaatgtggatgtcggtattgtggatgtatttgcaaagaatagtgagggaaagagggttcataagcagttagaggttgattttgtagtgaaccaggggagtcagagatattatattcaggtagcttatgatatgacttctgaggagaagcagacacaggaacttaattcactccgtaatattccggattcatttaagaagattattatagtaaatggaacaaaaaagccttggagaaatgaggaaggatttgtaatcatgggcatgaaatattttctgcttaatgcagatagcttggggttttagtttggaaggagataatatattccgattatagaagatatggatataaagttaaatccgattttccgggagacttacacgcttggggatgtcggtgtaaaggagaagggatatacatcacggaagcctgcatgggatgcgacgcctgcgcggcagtatgtccgcagcggtgcattgaggagggcgcgccgtaccggattcatcggaatcattgcttccgttgcgggaactgctgtgagaactgtccctcgcacgcgattgagcgaaaacgagaaaaaacgattagtcgtacatatcacgaaaaaatgaaaatgccagaaaattcatgcttaaatgataaaaaatgcgaataataataaaaaatgttttcattgactaacagatattgaggtacttacaatgggaacaaaaggagggggtttttatgtatgcattgtcaaaagcacaggcaggagatatatgtacgatcaagtggatgttcgggctgccggaggcagtcgattttctgcgccagcatcacgtggaggagggagagaccatacaggtcatccgtaagctgcgggacagtctgatcataggggtgcagaatgagcgggtggcgcttggaaaagaaatcgcagaccgcatacaggtttaaaaagaaggagggcagagcacttgttgcgctgctctcctttttgtgtaataggaacgaagtttcctattacataaaaaagtctgtcttctggcaagaaaactggtcataccagaatccagatggcagattgcacaaaaacagaaccgtaaatatagtgcaaaatagcgttgatttcacagaaaaagtgtgttaaaatttagacaaacatgaggtatgaccagaacgcaaccgaacaaaggaatacctcggcacagggaaaggggcatacgaatgagtgagtttaaggtgattgaaatcaagaagaacattctggaagacaatgacagagaagcagatgtgcttcgttctgagttaaaggcagacagaacatttcttctgaatctgatgtcttcaccggggtctggaaagacgaccacgctggtgcggacgataggcgcgttaaaagacgagatgcgcattggagtcatggaggcggatatcgattcggatgtggatgccgacacgatcgcacagactggcgcgaaggcaatccagatccatacgggcggcatgtgccatctggatgcggacatgacgagacagggcattgagagcctcgagacaaaggacgtggatctcgccattctcgagaacgtcggtaatctggtctgccctgcagagttcgatacgggagccgtaaagaacgccatgatcttaagcgttccggaaggggatgacaagccgttaaaatatccgttaatgttttccatctgcgacgtgcttttgatcaacaagatcgatgtacttccatactttgattttgacatcgaggcatgcaaagagcgtgtgaagaagctgaacccgaacattcagatcattccgatctcttcccgcaccggcgaggggatggatgcgtggtacgactggcttcgcacagaagtaaaacagtggaataattaaaaactgccggaagcggcatacatattttatgggtatacacaggctatgagtatgcgcactcttagagtgcgcactatttatgcaaatataagacgaaaacagacgagacagaataaaaaaacaggaaaaacaacgaaaaacgaaggaaaaaggagactgttatggcagaagaaagagaactgattttaaagctcgggaaaaagattaccgaccgtattccgtacaagcttggtatggagaagctcacggtaaacgatccggaatactggggtcttgcaggtgtggttaccgatgagatggcggaagtggcactgtgcatggacgtgcgcaagccgattacccttccgaagctggcaaagaagaccaagaagccggaggcagagctggagaagctgttgcaggagatggcggttgtcggaattatcgagtacaactgggagaatccgcagcatgagaagcagtacattctgccgatgtatgtgccgggaagcgccgagttcatggtaatgaacaaagagcaggtggaaaagcacacagaggtcgctgatttcttcgagaatatgtcaagacttccgttagagaaggtgacaccgatggtgccgctcggcggagccggtatcggtatgcatgttatcccggtagagaaggctattccggcagcacaggaatctgcagatgtggagcatatttcccactggctgaaaaagtacaaggacaagtatgcaatcggacagtgttcctgccgtttgcagcagagagtccgcggagagggaaccggtgatattgagggcgagtggtgcatcggtgtcggcgatatggcagatttcctggtacagaccggaagaggccactatgtggagcttgacgaagtgttagagcttttagagcgcgccgagaagatgggttatgtacatcagatcaccaatatcgacggcgaggataagatttttgcaatctgcaactgtgcagtcggcgtctgcaacgcgctgcgcacctcccagctgttcaatacaccgaacatgtcccgctctgcataccgcgcacatgtgaccaaggaaaactgtgtggcatgcggccgctgcgtggagtattgtccgaccggtgctgcaaagctcggacagaagctgtgcacaaagaacggtgagatcacttatccgaagcaggaacttccggatgcgacaaagtggggaccggagaagtggagcacagattaccgtgacaagaaccagatcaactgctatgagaccggtacagctccgtgtaagactgcctgtccggcacacgttccggtacagggttatgtgaagatggcagcggaaggcagatacatggatgccttaaagctgatcaagaacgagaatccgttcccggcagtctgtggttctatctgtaaccgccgctgtgaggatgcatgtaccagaggaacgatcgatcaggcggtagccatcgatgagatcaagaaattcatcgcagagcaggagatgcatgcggataagcgctatatcccggagattgtcaaccatcttggaaccggcgtggatctgccgcagaagattgcgattgtcggcggcggcccagctggtctttccgcagcgttttactgcagaaagatgggttatccggtaacggtattcgagaaagagtcccgtccgggcggtatgctgttaaatggtattccgtcgttccgtctggagaaaaatatcattgacgcagagatcgaggttctccgccagatgggcgttaccttcaagtgcggcgtagaggtaggaaaagatgtgacgatccagcagctccgcgaggaaggcttcaaggcattctacgtggcaatcggtgcacagggcggacgcaaggccggagttccgggcgaggatgcggatggcgtgaagactggtgtggaattcttaagaagcgtgaacctggatgagagcacaaagctttccggtcgtacggttgttgtcggcggcggtaacgtggcagtcgatgtggcaagagcagcgctgcgcgcaggttccggtgaggtttccatgttctgtctggagtcccgcgacatcatgccggcggcaaaggatgaagtggcagaggctgaggaagagggcatttccgtaaacaattcctggggtccgaaggagattctgacagagaacggaaaagtgaaggcaatcgtcttcaagaagtgtctctccgtcaaggatgcggacggacgtttcaacccgcagtatgatgagaatgatctgatgaccgttgagtgcgagaacgtgctgctttccatcggacagtccatcgtctggggagatctgttaaagggaacaaaagtggagatcagaccgaacggcggagctatcgctgacccggtaacctatcagaccgcagagccggatatctttgtcggcggtgatgtatacacaggaccgcgttttgccatcgatgccattgcagcaggaaaagaaggatttgtatccatgcatcgttttgtcaatccgggacagagcttaacactcggacgtaaccgcagagagttcatcgagctggataagaacaacatagacgtggagacatttgacaacgcaaaacgccagattccgggcacaaaagccggcgtggcaaaggagacattccgcgacttgcgctgcacactcaccgaggagcagatcaagacagaggcaaagcgctgcctcggctgcggagcttcggttgtggatgagaataagtgtatcggctgtggaatctgtacgacgaagtgtgagtttgatgcgatccatctgacacgtgatctgccggatgcaagccgtatgtggaagtctgaggacaaactgaaagcaatcgcaccgtatgcgttaaagcgtcagtttgcgatcaagcgcaacaagaattaagaggagtcatatgcacgagctgggaattattgttcatatcgcaaagacgctggatcaggttgcagcggagaacgaattaaaaaaaattggatctgtcacgttggacatcggtgaggtcagcggcattgtgccggaatatctgacggagtgttgggaattttaccgcaaaaagaatccgctgatcgcagagtgcgagatgaaaatagagtcccttccggcggtcacaatctgtgaggactgtcagaagacctatgagacggttacttacggaagacagtgcccgcattgcggaagctatgaaacgtatcttgtgaccggcaacgaatgcagtatcaaggagatcgaagcctgctaa

SEQ ID NO: 1125 - DNA, 23234 bp, unidentified
  source 1..23234: mol_type = unassigned DNA
gccggcgttaccggcagttccacggcgaagaggccctccccgcgctgctggcctacacgggcgtcgtattcaggcatatcgccccggagcgattcacccccggggatttcgaatacgcacagcagcacctcaacatcacgtcgttcctctacgggctgctccggccgctggacgcaatccgccgctaccggctggaaggggacgccgtattgccggggcacgacgaccaaacgatgttcgggtactggcagggacggctgacggaggccttcctcgaaaaaatccatgccgacgacggcatcctggtcaacctcgccagcagcgagatgaagcgcctgttcgactggaaacgcatccgccgcgaagcgcgtatcatcacgcccgaattccgcatccgtgaaggcgaccgtctgaaaaccatcgtggtctacacgaaaatgtgccgcggagagatgacgcgccacctcatcagaaaccggattgcggatccggaaatgctcaaagaattcgaatgggaagggttccggttcgacgccgcgctcagccggggcgacgactggacgttcacgatgtaacacggccgcaggaaaccgaagaagaaccctccggctcagtttcattgcccctggtcgacgaacaggagcctgtccgtccggtaaccgcgtcgttcggccagcccccgttcgaacggatggtcgtagcgggcgacctcctgccaagagcccatgtagcacgcctgatcgaacgacggcaccggagtgcggtcggtacggtcggcggcacggccgtatgccacgccgatgacaagcagcgcggaggccaataatacgatcgcgattttcacttcccgaacggttttcagggagcatgtgacagattttatgccgcagcacggcaaacagggctggacggttttatttccccgcggcgagcagcgcccgcaggataccctcctcgtcgtaaccgcagagggcgtagagctgagccggggttccgtgctcgacccactcgtcgccgatgcccagcgagtgtacggccacctcgcagccgcgggcattgaaaaatgccgtgacggcctcgccgacgcccccgcgcagggaaccgtcctcgaccgtgaccacatggcggaactcggcaccgaccccggccagcagggcctcgtcgagcggtttggcgaagcgcaggtcgtaatgcgccacgctcacgcccttcgccgcggcgcgttccgcggcacgggcggcagcgttgccgaccgtcccgaccgtcaccaacgccacgtccgtaccttcgcgaagcctccgtccccggccgacgggcagcgcctcgaagggaacgccccgccaccgacgtcccgcaccgttgccgcgcgggtagcggatcatgaagggatggccgtattgcagaccggtatacatcatgttgcggagttccagttcatccatcggcgcagcgatcgtaagtcccggcacggcaccgaatgcagccatgtcgaagaccccgtggtgggtcacgccgtcctcgcccacgatgccgccccggtcgaggcacatcaccacgggcagatcctggatcgcgacgtcgtggatcacattgtcgtaagcccgctgcatgaaagacgaatagatgttgcagaaaggcaccatgcccgcagcggccatcccggccgagaaggtcacggcatggccctcggcgatacccacgtcgaagcaacgcgacggcatggcgtgcatgagcatgttcatcgaacaccccgacggcatggcaggcgtgacgcccacgacccgcgggtcgagcccggccagttcgacgagcgtctcgccgaagacatcctggtaacgcgccgcggcgcccggcgaggcgatccgctcgcccgtatcgggattgaaacgtccgggggcatgccacgtggactggtcgtgctcggcaggcaggtagcccttgcccttcacggtcatgacatgcagcaacttgggcccttcgatgtcgcgcaatgcccgaagcgtgcgcaccaactccttgaggttgtggccgtcgacggggccgaaatagcggaaattgaagctctcgaagaggttgctcttgttcagcaccccctgtttcacggcgttgcccgccttctggcagaggcgcagcaggcgcggcgtatgcgaaaggatgccccacaaccgctgcttgaaacggttgtagtgcaccgatgtggagattttgagcaggtagttcttcaatgcgccggtggcctggtcgatggccatgttgttgtcattgaggatcaccaggatgttggtgcgtttgctggccccggcattgttgagcccttcgaacgcgaggccgccggtcatcgaaccgtcgccgatgacggccacgacctggtgcctctcgccccgcatttcagcagctttggccatgccgaacgccgccgaaatcgacaccgaggcatgcccgcccccgaaagcgtcgtaggggctctcggacatgcgcgggaaaccgctgatgccgcccagcaggcgtttggtcttgaacgcctcgcggcgcccggtgataatcttgtgggcataggtctggtgccccacgtcccagacgatcttgtccgcgggcgtatcgaaaacgtagtggagtgcggcggcgagttccacgcagccgaggctcgacgccagatgcccgggatttaccgagcactcgtcgatgatatagctgcgcagctcgtcgcagtaggtacgcagttcctccgccgagagttgcttgaggtcgcggggagaatttatttttcggagtaatttgtattcatccaacgtcatggcagcacaaagatagcgcaaggagcgcgacaaaccaaacttgtttgagtttgtccgaaccgcagcctatctgaaacgaggttaaagatagcacaagccgagcacaatgccaaatttattcggacattgccaaggcgaagcctgtgttccgtaaaacagctcagaccggacatggcgccgttttttcccggcatagccgccataccgcctattttctgtaaagatagtcattcttgcgtttttttcaataaaaatttttatcttcgcgttacggtaaaccccatcgtacaatgaaatacaagcgaatactactgaaactgagcggcgaatcgctgcaaggttcgcagaaatacgggctctcccccgaagtactccagtcctacgccgaacagatcagggcggctgcggccacaggcgtccagatcggcatcgtcatcggcggaggcaacattttccgcggcctcacgggcgcaaagaaaggcttcgaccgcgtgaaaggcgaccagatgggcatgctcgccacgatcattaactcgctggccctgcaatcggccctggaggacaacggcgtgaaggccaaagtcctgacctcgatccgcatggagcccatcggcgaatactactccaaggcgcgtgccatcgaatacctcgaggcggggtatgtggtcatcatcggcggaggcacgtcgaacccctatttcacgaccgactcggcttcggcgctgcgcggcatcgaaatcgaggcggacgtgatgctgaagggcacccgcgtggacggcgtatatacggccgaccccgaaaaagaccctgcggccgtcaaattcgatgaaataagcttcgaagaggtgctcgaccgccggctgaaagtcatggatctcacggcattcacgctctgccgcgagaacggactgcagatcattgtcttcgacatggacacgccgggcaacctcggcaaggtgcttgccggggagaggatcgggacacttgtaaaaaaataagattatggccacaaaaaagagcaacaagcagctatggatcatgctggcgctgatcgcagtgatcatcgccgcaatcctgttactgccctcgtgcggcagccgcggcggcaaagccgaggcggataccgaatcgaccacgctggtcaaggcgggcgacaaagcccccgacttcaccgtggagatgttcgacggcacaaaaacctccctcgcagaactcaaaggcaaagtcgtgttactgaacttttgggccacctggtgcccgccctgccggcaggaactgacccgcgtgcagaaggacatcatcgaccgtttcgccggtcgcaacttcgtattcctgcccatatcgcgcggtgaaaagcgggaagacgtggcggcgttccgcgaaaagacgggctatacgttcccgatgggcctcgacccctcgcaggccatttacgaccgttatgcctcgaattacatcccgcggaatttcctgatcggcgccgatggtaaagtcgtgctggcaacagtaggttacgacgccgaagagttcgacgaaatgatcaaaaccatcgaaaaaatactcgaataatatggataccaagacgattctcaacgatgcctccggccgtatgcagaaggccatcgaccacctcgaagaggaacttttgaacgtgcgcgcgggaaaagcgtcgcccaatgccctgaacggcgtaatggtcgattatttcggctcgcaggtgcccatatcgggcgccgccagcgtcaccgtacccgacgccaagacgatcctgatccagccgtgggacaagaacatgctgcgtgcgatcgaaaaggccatcatcgactcgaacatcgggctgacgccctcgaacaacggcgagcagatccgcctgtcgatcccgcccctgaccgaggagcgccgcaaggagttggtgaaacaaatccgcaacgaggccgaaaccgcccgcatcagcctgcgcaatgcccgccgcgacgcggtcgaggcattcaagaaagcccagaaagaaggtatgcccgaggatgagtcgaaggacggcgaagcacaggcccagaaattgctggagaaattcaccaagaccctcgacgaggcgctccagaaaaaggagaaggagatcatgacggtataaatccgtccgccccatagttaaaatccggccagcacagtatgttggccggattttttcatatctttgtccgttgtaacgatccgcctatgaaaaacatccgcttcgggctttgcatcccggcattcctgttcgcgctgttctgcacgcagcaggcatccccgcagggatatgtcaagctcaatgtcccctatgccctggtgggcgtggtgaatcccgccgtggagttcgccatctcgcccaaatcgaccttgcagaccgacatcgtcatctcgccatggaagtcgatcaacgaaaagcacatgctcttcgccatcttcatgggcgaataccgccgctatttcaaggagcataaccggggctggtatctgggggcaaacatcggcatgatggccttcgacatgtcgaaaccttacatcgaagggtggaaactgaaattcgaagaccgttactgcaaaggatacggcatgatgatcggcctctgcgtgggttatgaataccagttcgggaaacgctggctgctcgacgctttcctgggttgggcatggatggacagccattacaacggatacagtttcgacggccaggtcgacatgtacccccaccgccccgtacaacccgaacatcccgacccgttcaacggctcttcggagtggtatcccaacaagatcggcgtctcgatcgggtatcgcatcttcacgccccgcaacaaacagcggacagcggacgtgcgctaaacagcagttgcggactgcggcaggcagccatgcacggaaagtccgcaactccggaaccaaagggagcagtactcccggaatgcgggcaaccggaaacagcggccggcccgggaacctaaacccggggtaaattgcagcgggcccttccgaggcacacccgcaacaagcccgcccgaccaggccgcaacccggaatcgcggcaggcggcgaccggaaatcaccgtaagcagccccgagccgcaccgcggcatacggaagccccctcccatcgcagcatacgcaatgccgcaaaataaagaaccccgcaccttccggcgcggggttctaccattcaaaactttattcagagattatttcactttcgggccggcggctacgagcttcttaccctcttcgttacccgtgaacttcacgaaattcttcacgaagcggttggcgaggtcttcggccttgacgtcccaatccttggcgttcttgtaggtatcgcgcgggtcgaggatcttgggatctacgcccggcagctccgtcgggatcgtgaagtcgaagataggcagcgtcttggtcggagccttgtcgatcgaaccgtcgaggatggcgtcgataataccgcgcgtatccttgatcgagatacgtttgccggtaccgttccagcccgtgttcaccaggtatgccttggcaccggccttcttcatcttcttcaccagctcctcaccgtacttggtggggtgcagcgaaaggaatgccgcgccgaagcaagccgagaaagtcggagtcggctcggtgataccgcgctcggtacccgccagcttggcggtgaagcccgacaggaagtagtacttggtctgctcggagttgagaatcgaaaccgggggcagcacgccgaatgcgtcggccgaaaggaagatcaccttcttggcagccggggctttcgatacgggtttcacgatattctcgatgtggaagatcgggtacgaaacgcgggtgttctcggttaccgacttgtcggcatagtcgatcttgcccttcttgtctaccgtcacgttctccagcagcgcgttgcggcggatggcgttccagatgtcgggctcgttctcctgcgagaggttgatgaccttggcgtagcagccaccctcgaagttgaatacgccgtcgtcgtcccagccgtgctcgtcgtcgccgatcagctcacgcttcgggtcggtcgaaagcgtggtcttgccggtgcccgacaggccgaagaagatagcggtctcgcccttggcattggtgttggccgagcagtgcatcgaagccatgcccttgagcggaagcaggtagttcatgtaggagaacatacccttcttcatctcgccgccgtaccaggtgttgaggataacctgcattttctcggtgaggttgaaaacgacggccgtctcggagttcaggccgagtttcttatagttcttgaccttggccttcgaagcgttgagcaccacgaaatcgggctcgccgtatttctccagttcggcgtcggtcggacggatgaacatgttctttacgaaatgggcctgccatgcgacctccatgatgaaacggatcttgaggcgcgaattctcgttggcgccgcagaaagtgtccacgacatagagtttcttgcccgacaactcctgggtagcgagtttcttcagctccttccaggcagccttcgtaacaggcttgttgtcgttcttatattcatcggaagtccaccagatcgtatccttggtggtctcgtccattacgaagaacttgtccttgggcgaacggccggtataaacgccggtcatcacgttcacggcaccggtctcggtcagctggcctttttcgaaaccgcggagccccttcttggtctcctcgcggaaaagttcgtcgtacgacggattgtacacgatctcggtcacacccgtgatcccatactttttcaaatccattttgtccataataattgttattttaataaaacatcaaatccttgattaacctaacgtcgaaaatccgcaagaccggactttaaccgcacaaaggtagaaaaacttttacacttgtgaaaaaactaacagtgaaaaaagcaaaaaatatccattatttttcccgatgcctgtatatgattcatttataagcagctatcgtatcccccaaagccgcaggaaaacccggctccatatcctgctgcaaacatacggccgcaatccgcaccggggctccgcaggatggaattcgaggcggacgcacaggccgcacttcggtcgaaatgcccatcgacggcgcacggcactcccgcccgacggaacgccgcccggacaaaaacaatgacgggagagggcgcttccggagcaaccgcatcgaaatcaggaaaccggaggtattttccgtaaatccgatccggcagccagacccgacgcacgggcaccgaaaaaaccggggcggaaagggacgacatccgggaatttttcctatctttgattaatcagcccttatacaaaacatcgttatcattataatgcgcccgataaaaatacgccacgacaggatctgcctgaaaccgttttcgatcgaatgggtaaactaccattgtttctccatcctgttaattatttccgggatattcttttcctgttattttatccgcgacctcattcagggatttcgggatcggtattggctggccgcgctcctgctgttcggcgcgggctttgctctccatgtgttacaacgcaggaaactgaagttcaagagtatcccgctctccgggcaacccgacggactgaaagatcagatccggaaactgctgtccgacgagggatggaggatcgaatacgacaatcagcgttatttgcaggccacaaaccgaaagggcatcccctatctggactgcgacttgctgatcttgagctggagaaacgatgaaatccggtgggctctggtctacgatccgtggtataacatcgcagggggaatatttacgttcaacagatacggacggaaaaccgtaaaggcgataaaggcgctcgccgccgaaccggcggaaactcctgctccccgaaaactcggataggccatggccggactctatttccacataccgttctgcaaacgcatctgcgcctactgcgacttctacaagagcgcccggctggagcagatggacggcgtgacagccgccatgcaccgcgaactggacgaacggcaggattacctgcgcggcgaagcggtcacgacccgctatttcggcggcggcacgccttcgctctacgcacccgccgcgctgaaaggactgctggatcatgccgcgctgctgttcgactgctccggcaccacggaaaccaccctcgaggccaaccccgacgacctgacggaaaattacctcgacgggctgcgcgaagcgggcatagaccggctgtcgatcggcatccagtcgttcgacgacgggtgcctgaagctgatgaaccgccgccatacggcggcacaggccatcggtgcggtgcgggcggcacaacgcgccgggttcgggaacatcaccgccgacctgatcttcggcattcccggcttcggcggggattcgctgaaaagatcgctcgacggaatgctgtcgctcggcgtacagcacatttcggcataccatttgaccatcgaacccgatacggccttcggccgccgtgcggcacggggcgagttccgcgccgtggacgaagaggtcagcgaggaggagttcctcacggtgcacgatacgcttacggccgccggattcgagcattacgaggtttcgaactatgccctgccgggatttcgagcccgtcacaacgcctcctactggcatgggacgaaatacctcggcatcgggcccgcagcccactcgttcgacggcgaagaaaggcactggaacgccagttcagtggaaaaatacatagcaggcgctcccgccgggaaggaagtgctgacccgacgcgaccggttcaacgaatatgtcatgacggcgctccggacggtcgaggggatcgatctggaagaggccgcggcacgtttcggagcaaaacggctggcgcggatgcaggaagaggcagcaccgttcctccgttcgggtacgctccgcatagcccgggggcggatggccctcccgccggaaaaattcctgatttcggatgccgtgatcggggcacttttcgaaacataacacgacatgcaacgatgtgaaacagaaatgttaagttattattaaatatttttactaattaatcgaacaaggttgttttatataaatataagtattacctttgcagcggttttcaaccgattcatcgagtaaattacaaacaagcacgacaaatatgagtaatgcaaaactgactcccgactaccttttcgaggtgagctgggaggtctgcaataaggtcggcggcatccataccgtcatctcgaccaaagcacagaccgtaacccgtaaattcgccgaccgctatatcctcatcgggcccgacctccagcacgagggggcgaaccccgaattcgaggaagaccccgacatgctgaaggcatggcgccagagcgtatacagcgacggcctccggatccgcgtgggacactggaagatcaagggcgagccgacggtgatcctggtggactttacttcgctgatcccccgcaaagacgaaatactcaagaaactctgggagacgtaccacgtggattcgctctcgggacagtgggactacatcgagcccgtgctcttcggctatgccgcgggcatggtcatcgcctcgtatgtcgacaacttctgtaacgcgacggacaagatcgccgcgcatttccacgagtggatgaccgccgcaggcggactccacctgcgcaaacacgccccctatgtggccacgctcttcacgacgcacgccacggtcatggggcgctgcatcgccggcaacggcctgccgctctacaacgacctggcgaaattcaatgccgacgaactggcccggcagttcaacgtcgtggccaaacactcgatcgagaagatggccgccacgtaccacgacgccttcctcacggtcagcgacatcacggccaacgaatgcaaatacctgctggggcgtgaaccggacggcatcacccccaacgggttcgaaaacgacttcgtatggacgggcgaggagtacgacgccaaacgtgccgaagcccgcacggcgatgatctcggtagccgaagcctgcctcgggcacaagttccggaaggaaccgctgatcgtcggcaccagcggccgctacgaattccgcaacaaggggctcgacgtattcatcgagtcgctcaaaaagctggccgcctccgaccgtctcaaacgcgaagtcctggcctatgtcaccgttccggccgccaaccgcggcccgcgtgcggacttgcaggcacacctggccgacccggccagcccgatcgacggcggacaatacaagtattcgacccattacctcgaataccagaacagcgacccgatcgtgaacgccctgaacggcagcatcctcacgaccgacgattcgaaggtgaaggtgatcttcgtgccgacctacctgaacaaggccgacggcatcttcaacaaggattactacgaactgctcgtcggtatggacatcacggtattcccctcctactacgaaccgtggggctatacgccgctcgaatcggtggcattctcggtgccgaccatcaccacgaccctcgcagggttcgggctgtgggtcgacaagcagcgcgagcacctgggcgtggaggtcatccgccgcgacgactacaacgacaaggaggtcgaggagaagatcgccgactcgctgctgcgcttcagcgcgctggacgagaaacatgtctccgagatgcgcgtttcggcctacgagatatcggaaactgcgctctgggagcaccttttcgccgcctacgaacaggcctactccgaggctgtcgaaagttcggtgatccgtaccaaccgcgccgtgctcgacgagagcaacgcccgcaacgaacagatcaatttcgtacgccagcagctcttcgccgagaagcccaactggaaccgcatgatggtcgacaagaccctgcccaagcgcctgcatgccctggaagaactttcgcgcaacctctggtggtgctggaaccccgggccccgcgacctgttcgaaggcatcgacccggcactctgggccgaatgcgagcgcaacccgatcgctttcctcgacaaactgagcgtggaacgcatgaaggggctcgaacgcgacgaggccttcctcgggcagctcgacgccgtatatgcgcagttccgcgactatatgaacgaaaaacccgacccgaagacccccacgatttcgtatttttcgatggaatacggcctgcactcgtcgctcaagatctactcgggcggcctgggcatactcgcgggagactacctcaaggaggcctcggacaagaacgtcccgatggcagccgtgggcctgctttaccggtacggctacttcacgcagcgcctttcggcacagggggcgcaggaggcgacctacgaggcacagaatttctataaactcccgatctcgcccgtgcgcgacgaagccggcaactggctgacggtcaccatcgccttcccggggcgtacgctttcggcgcgcgtctggaaatgccaggtcggccgcacggatctctacctgctcgacacggatttcgaggccaacctcgaggaagaccgccagatcacccactacctctacggcggcgactgggagaaccgcctcaagcaggaaatcctgctcgggatcggcggtatccgcgcactgcgcgcactgggcatcaagcacgacgtgttccactgcaacgagggacatgccgcgttcatcggcatcgagcgcatccgcgacctggtgaaccacaagaagctctccttctcggaggcgctggaggtgatccgttcctcgtcgctcttcacgacgcacacccccgtgcccgccgggcacgacgccttccccgagtcgatgatccgccagtacatgtcgcactaccccgacgtgctgggcatcacctgggagcagtacatcaacctgggcaagaccaaccccaacgaccccaacgagaagttctcgatgtcggtgctggcctgcaacctctcacaggaggtcaacggcgtatcgtggctccacggcgaagtgtcgaaggagatcctgggcaacatgtggccgggttatttcaagaacgaactccacatcggctatgtcacgaacggcgtacacttcccgacatggatcgcgacgaacctgcgccgcctctacgcccgctatttcgccgacggcttcgaggggcacgcctacgacatcccggcatggcagaaagtccacaacatccccgacggggagctgtgggccgggcgcatgcacctcaagaacaagctcatcaagcatatccgcaagcgttacagcgaccccagccaggtgcggctcgactcgccgcgccagatgttgcaggtcatcgagggcatcaagcccgacgtgctgtccatcggtttcgcacgccgcttcgcaacctataagcgcgcctacctgctcttcacgaacctcgaccggctctcggccatcgtgaacaacaaggagcgccccgtgcaattcatcttcgccggcaaggcccaccccaacgacaagccggggcaagacctcatcaaacgcatcgtcgaggtggccgccatgccgcagttcgtgggcaagatcctcttcctgcagaattacgacatggagctggcacgccgcatggtgcagggcgtcgacgtatggctcaacaccccgacccgtccgctcgaagcttcggggacgtcgggcgagaagtgcgtcatgaacggcgtgctgcaattctcggtgctcgacggatggtgggtcgaaggctacaaggagggcgccggatggatgctgcccatggagcgcaccttcgccgaccagcactatcaggacgagctcgacgccgaaatgatctacaacaccatcgaggagcagatcgtcccgaaatactacgaccgcgacaaggacggcgtaccccacgcatgggtggagtcggtcaagaaatgcgtcgccgacatcgcatcgaatttcacgaccaaccgcatgctcaacgactacgaggagcggttctacaacaagctcgcggcacgcaagcaccggatcgtcgaaggcggctacaagctggcccgcgagatcgcggcatggaaacgcaaggtctcgtcggtatgggatcagatccgtgtgatcgacgtacagcgtgtgaaaatcgacaacaaggcgatcttcgtaggcgaaaagtaccatttcgaagtgaccgtggacatcgtcagcctgcgtcccgaggacatcggcgtggagatggtcatcgcacagcagatcgtcggcgggcagaatgccaacgtgatgcgcacgatcgggctcaagcacaccaagaccgaaggcagccgcgttacctacgcactggattatacgcccgacgaagccggcacgttcgacgtggcgctgcgtattttcccggagaacccgcacctgccccatcgcatggattttgcattggtaaaatgggcttagcgaatttgggcctaataatgtaaaaaagatatgaattttcggaaatgcgattgtcttttcatgaaaattcagctatctttatagaacgaaccgtatttttttgaaggacatgtcagcacttactttcgacaaaagcgaattgggcaacctggagtattcgctccagcgcgaaatgctctccacagaccgtatcggcggatatatgagcacgactatcgtctgctgcaacacccgccgctaccacggcctgatggtagcgcccatcgacgacagcgacaggacgtatgtcctgctctcgtcgctcgacgaaaccatcgtccagcacgaccagacattcaacctggccctgcaccgcttcaagggggtatacgagccgcgcggacacaagtatatcaccgatttcaaatatacgccgacccccacgatcacctaccgcgtgggcggcgtgatcctgcggaaggagatgctgtggatacacaagcgcacacagctgatgatccgctatacgctcgtcgatgcgcattcggaaacgtacctgcggctgcggcccttccttgcctttcgcgacaaacatgcgctgacgcatgccaacatggatgccgacgggcactcctacccggcggtcaacggcgtgaaatgccgcctctacgggtcgttcccgtggctatacctgcaaaccagcaagcccggcgcggagttcgtgcccgcacccgactggtactacggattcgaataccagcaggatctggcgcgcggttacgacggttacgaagacctgctcacgacgggctatttcgaaacggaactcaagaagggcgaaagcatcatcttctcggcttcgctcgacgaaatgggttcggtcaagaccatcgaagaggtattcgccgcatccatcgcccggcgcacgcacaagatcgacttcatcagctgcctggagcattcggcgcggcaattcgtcatccggcgtcccggcgaccgcaccgaagtggtgtcgggctatccgtggcacggggtttcagggcgccagaccttcgtatcgctcccgggcatcacgctcgaacaggggcataaggaggactgtatcgacgccctcgacacgctggtgcgcgaaatgcgcgacggtatgttcacgggcaacgcctcggcggccgtcgcggcagatgccccgctgtggttcttctggacgctccagcaactcgaacgggaagtgggcggcaagcagatatggaaagcctacggcccggccatgaaagatattctggagagctaccgccggggagtcggcggccgcgtcgcgctgcatgacaacggactggtgtgggccgctgcggacgacatcccgatgacgtggatgaatgccgtgatcgacggccgccccgtcactccgcgcaacggttaccaggtagaggtgaacgccttgtggtacaacgccgtatgttatgcgctcgaactggccggcaaacacgcagacaaagccttcgtcaaggcctgggagtcgctcccggcacgcacgcaggcgtcgttcgtagaactgttccgcctgccggaaggttatctggccgatttcgtagggacggacgggcccgacaaatcgacgcgccccaacatgatcgtcgcctgcgggctggattacaagatgctcgacgaagagctgcaactggaggtgatccgcaccgtgcgccagcacctgctcacccccaaggggctgcggacactctcgccccgcaacctgctctacaaaggttcgctggagggaggatcgcccgcagaacgcgatttcgcgggcaagaacggttcggcatggccctggctgctgcaattctacgtcaaggcatgtttcgatatcgacagggacgtattcctgccgcaggcccgggagatactcgccaatttcgacgaggacatccagagctacggcatcgggtcgatttgtgagctctacgatgccgacccgccctatgcatcgcgcggggctatctcgcaggcgtggagcgtcggggccgtgctcaatatccacagcatgatccgcgagcgcacgcaggaggaggcccgggaaagcaaaaccgcggggaaagccgcgaaggcggtgaagcccgtggcgaaaagcattgccaaaaaagctgcggtaaagaaaaccgcaacggacaatatgccaaagaaaactgcggcaaagacggccatcgcaaaagaggccgcagaaaagaaatccgcagcgaaaaagagtgcggagaagaaaccgacggaaaaaaagccggccgcaacaaaggccgcgacaaaaaagacaaagactgggaaataacaggctgtgacgggaggaaaatcctgccaaggcgggattccggggcgtccggacttgcaaccgcggcttgtggccgtgagccgggacgttcctgtgagaggaaaggtaaaaattgcaaaacaaggatatagttatgagagttttaatgttcggttgggagttcccgccccacatcgcgggtggtttgggaacggcatgttacgggatgacccgcgggctggcacgcaacgatgtcgacgtaacattcgtagtaccccatgcctacggcgacgaggatcagcgattcacgcacgtcctgaatgccagtgacgtggaggcgctttacggatctacgggaagcggcgcggacgatattctcgagaagatgtcgttcatccacatcgactcgaacatggtaccttatatctcccccgaagagtatgaacagtaccaggagcgctacgtcaaatccggacagaaagtctggtcgacgaccgatgcctggaaacaacgctataccttctcgggcaagtacggcgccaaccttatggaggaggtcgcccgctatgccgtagtcgcggcgcaggtggccaaagacctcgaagggcagttcgacgtgatccacgcccacgactggctcacctactacgccggtatcgccgccaagcgcgtatcgggcaagccgctggtcgtgcatatgcacgccacggaatacgaccgcagcggcgagaacgtcaacacgcaggtctacgccatcgaacgtgcaggcatgcatgccgcagaccgggtgatcgccgtttcgaacctcacgcgcaacatcgtcatcaaccgctacggcgtcccggccgacaaggtcgtgacggtacacaatgccgtgcggttcgccgcaggccagtgcaaaatgcccgaacggggcgtggacgacaagatcgtcacgttcctggggcgtatcacctaccagaaagggcccgactatttcgtcgaagccgcggccaaggtgctgaagaaagtccccaacgtacgtttcgtgatggccggctcgggcgacatgatgaaccatgtcatccgccgcgtggcgcggctgggtatcgccgacaggttccacttcaccggattcctgcgcggcgaggacgtacacaagatgttccagttgtcggatgtctacgtcatgccgtcggtctcggagccgttcggcatatcgcccctcgaggcaatgcgttcgaacgtcccggtgatcatctccaagcagagcggcgtggccgaagtactcgactatgccgtgaaggtcgactactgggatgtcgatgccctggccgatgccatctacgggctgatccagtacccggcgcttgcggggatgttcgcctcgaaaggcctggaagaggtcacgaacctgaaatggaacgatgccgcagccaaaatcaaaaccgtatacgaagcggtgatcgaagagaataaaaaacaataaaatagctaccctatgaaaaccgtctgcttatattttcaggtacaccagccctggcgactgaagaagtaccgcttcttcaacatgggcaaggatcacaactatctggacgacctgctgaaccgctccatcatgcagaaagtcgcccggcaatgctacctgccgatgaacgccctgttgctgaagctcatccgggaaaacaagggtaagttccgctgctcgttctcgatcacgggcatcgccatcgaacagttccgcacctatgcgcccgaagtcctcgaatcgttcaaggaactggccgccacgggttgcgtagagttcctcgccgagacttactcccactcgctggcctcgctggcttcgaaggaggatttcaccgaacaggtaaaactccacacggcacttataaaaaaggaattcggggtgaaaccgaccgccttccgaaacacagagctgatctactccgacgacatcggcgccgcagtggccgaaatgggcttccgtacgatgctggccgaaggtgccaagcacgtgctgggctggaaatcgcccaactatgtatacgccaacgccgtcaaccagaaactgcgcctgctgctgcgcaactacaaactctcggacgacatcgccttccgcttctcgaaccgcagttggaacgaatggccgctgacggcggacaaatatgtaaaatggctcgcttcggacgagactccgggcgaggtcatcaacctcttcatggactatgaaactttcggcgaacaccagaccgccgacacgggaatcttcgagttcatgcgcgcgctgccgaaggcaatcctcgccaagaaaaacggtctggagttcgcgaccgtcaccgaagccgccaagaaacaccagcccgtagcagtactccactgtccgcacgtgatgtcgtgggccgacgaggagcgcgacgtgacggcatggctcggcaacgagttgcagaacgaagcgttctcgaagctttacgcccagaaggagaagatcgcggcactgaaaagccccgacttcgactatgtgtggagtttcatgcagacctccgaccatttctactacatggctaccaaatggctctcggacggtgacgtacactcctatttcaacccctacgattcggcctacgacgctttcatcaactacatgaacgtcctctcggatttcatcatcgaactggacaaggctgtggcggcaaaggccgcaaaggcaaaataacgggcaaaagaaaaatttacgacacaccaaccgaatagcgaaacagccgggatccgaggatcccggctgtttttcgtccatcagtctccagatgggccaaacaaccgcccgtaaaaggcaggaatatccgccgctgcccgatgcaacgacggatattccataagatgcccgggcattccgtgcctgcagcctagcgatcgcccgaaagccgcaatccgcgcgagaaccgcgaaccacacaagaaacgggagccgtacaaaaacctccccccgaaaaaaccgggctccaggataacgaacccacaatgcggatcgagagaacgcagggaaacttccgggcataaaaaaagcggcagaccgcgcctcttcggtctgccacaggcaggagttttacttgaaagtgggagttgttgttaccaaaaaaatttgggatgtgcgacccctgccttagggagtatttcccgggttcccggcgctgctgcgaggcagcgccggattccgcgggaaagggattcaataattattttttgttctcgaacgtcagcgtgatgttcatcgggtactccttctctgcgtactgcttggttgcatccagcgaatacttgtaggtgaaggttacctgaatctgagctgttactttaccgcccagcaggtcgtcggaagcagcaacagtcatttcaccggtggccggatcgaacttgaagcgcgagaagtcctccgtgccagatacgacgctcgaatacgatgcgtcaccgaacttaacctcgaagccgtatgcacccgtagcgaaagtcgttacgccgcttgcatcaaccaaatcattaccgaagatgtcgcgcgggagcatatgtttcggattgccgtagtttttagcggccagtaccttctcgtaaacgttgacagttgcagccgtcttgacagctatcggcgttgcaagctcattgaagtttgtaccccagcttgcgatgtcgatcgggttggtaaggataacctcgaaagtcttcgaagcgatgggcagcccctcgtaagtcatctcggcaactactcctacggaattcagaccgcagccgttccaatccatcgtccatgcatccgacgtaacgttagttccgttggtaatcgtcggtaccggagttaccgtaggcgtcgttgcagccagagagaacttcagaccgatcttcgaagcatcggtaccgtcgggataagccgcattgtaggcattggtcagggtgatggtttcgaccgtgaagctgttgccggtcttgtctgccgtacccatgactactacgttgccctcggcattgacgctggtacccttggccagatagaagccctgatccttgttgatcgttacactgccttcgattgcgatcgagaagactgcatcggcgatcgtgtagcaagcgccctcaggtgccgtgaaggtataggactcggcattgtcgaagtccacatagctgcgctggaagtctacgcacagacggtcgtaactagtccctgccttaccgattccattgtaacgaacggctgcttcgagagcctgcgtcgtggcgtttttctgctcgttgttcttcatttcgccggggttggtgctctgacgcatgaaagcgaggaattcactggcatcggcgaagaaggtctgatcttcgggcagcagttcgtaaacggctttttccgcaaagttttcctgagcgattaccgtcagtacctgtgctccataattgctgatcttggcctcgggcatattcagcgtgtatttgagatcagaaggcagacccgtgagggtgatcttacccttcagcgtaatctcctcggcctgaccgagagttacggtcttctcgatatcgagcgtacccgaaccacccttgtaaccaccaatccaatagtcgaagaacttggcgtcgccattggtgttgatcgtcgggaggtttacagactgaatctggatgccctggttaagcgttccggcttcgtcgccgtaggtgacggtccatgtgttgtcggcttgaaccgatgctttgaactgatcgtactgagccttggtgagtttattagctccggcagcatcaaagacgatgttctggataagataagcgccattcgtcgagtaaatcgagtaattccatgtagcgctggcattgaggttttcgatggcaggcagctggaagcgcgtaagtgtagtctttgcggtgtaggcagcggcgccgttcgtcgcaacgttctccgtctcgccgacagcgtggatagcggttgtcacctcatctacgatcgttttgtctacgttggcgggaacgccttcctggatcgtgatcttgacgagctggctcttggccgcagcatccttcatcggatcggcgggatcgaaaacaaccttcgtcatacccgaagcaacagtccaactgctgcgggtgtatacgggcttagcatcaagctcgacatcccagttaccctgctcggcagccttatcgagcgaaatgatcgtattgcccatcttgtaggcgaacgagtactcgctgagcatcgtgagcggttctgtctggttgtagaccatctcgtactcggcaccgctagcggggatctcgacgagttttttcgcatcgccttcgccctcttctttggccagaacgatattggcgatagcgttatagtcgtcacctaccgtcggaatgtaagcggtagtatattcgataccggtatcgaccgaagtatcctcatccttagcaaccgacgatttgctggttactttcagcgcgatagcataggtctcggcagcatccgaaggagctgcggcggggtaagtataatccgtgcttacgaacatcgtgatcttaccgtcagcggagccgacaacatcgccttcgatctcgaacttgggtgcctcggcacgcgtaaccttttcgggaacgaacgagaatacatccttcgaagcattgtgcttagcggcgagctgcgtagccagcgttttgggcgaaacaaggaaggtcatctcgctcttggcgcccgtcgtcagacggatggtctccgagcctgcggtaacaacgataccgccgaagttggcgatgccatcgatgctcttgggaacataaaccagcgactggatgcggccggcgagattctcgacagcgctccagagattcttgatctgcgcatcataattttcgaaacgctccttcagatcggcttctttcaggtagatggccttaccttctgaatcatagagctcgtcgttgataccgtcctgaatcatcgactcgatagccgccttcagggttacattggcatcggtcagctctttgaggatcgtatcggtgatggccttacccatctcggccttaaccgtctcgtcgtcgaggtagttagccatataggtagcgaagttgtcgccgagaaccttcttgatggcatcggtgacagtggccgtctccgaagatacggaattggcaacagccgtgagtatctgatcgatctgagtcgccgataactgatcggtaccggttatgtaacctttaccctcgacgaagagcctcatctgctcctcggtaacatactcacccttgatcagagcctgcttgatgatctcctgaattccggcttgcagtttacccatggtttcctccgaagcgatcatcgtctcgaagatcttctcgacatcagcggcagtcaactgacccttggtcgcctcatcgatcagcttctggacttcatctttggtctgatatccctgagcctgaataagttttaacacctcatcgctagtcagccaatctttcagatccgacttcttggcatagtctgccagccttttgtcgagttctgtctggaggccgctgttggtaacgaaagacgagaaatctatcccattcaatttgtcggtaacaacttgaagggcagaagcgtcggccttcaactcgacttgacctttcaagtcgttgatctgacctttcaggtcgtcgatatcgtcgtcgtagtctttacaaccgacaccggctaacaatgttcccgtgaggaaca

SEQ ID NO: 1126 - DNA, 7216 bp, unidentified
  source 1..7216: mol_type = unassigned DNA
ctaatccttaatcccttgtttcaagtattcgtaaaagctatattgcgaccgtaccttctccttttgcggtcgtgacgacttccagcggtttcgcaaccggtcgtccacgaagcaggctttccgtttgtccgacagttgtatggatagcatatcgatgagctcttgcttcaagtccgggtccagaatgggggtgacggcttcgatacggcggtacaagttacgccgcatccagtccggcgagccgaggaagagcttgggtgcgccgccgttgccgaagtaccacacacgggcatgttccagaaaggtatccacgatgcgtgtcacgcggatgttgtggctgtactcctgcccagggatgaggcagcagatgccgcggacaatgaggtctatctctacaccggcttgcgaggcttcgtagaggcggtctatcatggcggggtcttgcagggcattcatttttaggataatccgtccttgcttgccttgccgggtcagttctatttcgtgattgatgaggcggttcagttcaggaatcaggttgaagcgggccacaagcaggcggtggaacactggattttcctttccctgcagagtacggaacaagttgtgcaggtcgtttacaatcaccgggttgcaggtgaatagtccgctgtccgcatagagggtggcggtcttttcgttgaagttgccggtgctgatgtaggcgtagcttgtcagtttgcgcccttccttgtcgcggcgtagcacgagggctactttggcatgtacctttagtcctggtatgctgaaaatgatgttgatgccggcggctttcatcatctcggcggtggcgaggttgttttcttcgtcgaagcgggctttcagttccacaaagacggtgactttctttccgttctgtgcggcggctatcagggtgttgatgacggtggagttctctgccacgcgatactgggtcaccatgatttcacgcacggtgggttcgtggacggcctcatatagaaaatggatgaagtggtcgaaggagtggtagggataatgcagcagcaggtccttcttctccacatagcggaagatggattcgcgttcgtccaggcaggtcagcttcatgggctggggtttcttgatgggacgtacgctttggttgggattgggcagatgccgcaaatcctccatgttgaggtgcttgtctcccggcaccagctcccggcggtctatgcggtaggcatctaccagaaagtcgaggaagtcctggggcatggcgcggtcgtatacaaaacggcacacggcgcctatcttgcgtttctttaccttcttcttcacctgctcgatgatttcggaggtattggcggcatcgtctatcagaatatccgcatcgcgtgaaatcttgatgcaataactgctgtccacttcataaccggggaagatggtatccagattggccttgatgatgtcttcaatgaacatcagataatagtctttccccaccttgggcagctggatgaagcgcggcactttgctgtacggcagtttcatcacgaaatactggatgcggtttggagaactggcgggagctcctttcagatgaagccgtacggccagatagagacggttgtcgcgcaggaatgaaatcaccttgtccttgcttacgggcaccggggccagataagggaatatctcttcgcggaagaagttgcgcacgaagtcgcggtgaaacggttctacgttgcggctttgatagaatatgatgtgatgtttccgcagggcgggcagtatcttctgttcgtagatgcggatacgttcctccagttggcggttgacttcttggttgatttcatctaccagttcggcggcagactgcatagtctcttcatcgctttgcgaggctccggtggctatggccttatggtcggctacgcgtatcttgtagaattcttccagattggaagagtatatagaaataaagttgatgcgttcgtatagcggcaatgtctcgtcttccgcttccagcagtacgcggtagttgaaggaaagccagctgatgtcacgtttgaaatatctgttgtccatggtgttaaggtgttaatgtggcatattagcacattaccacattgtattcttcccaaatataattacctttgtcttaataaacaaaggaaagatgacaaaagttggtttattatcggatacgcatggctactgggatgaaaagtacctgcaatattttgagggctgtgacgaaatatggcatgccggtgacatcggttcgctggaagtggcacagaagctggcggctttccgtcccttccgtgccgtgtatggcaatattgacgggcaggagatacggcagctctatccgcagattctccgtttcacggtggatggggcggaggtgctgatgaagcatatcggcggttatcccggcaactacgacccttccatcaagggcagcattctggtgcgtcccccaaagctgttcatcagcgggcactcgcatatactgaaggtgaagtatgacaagacgttggatgtactccacatcaatccgggcgctgcgggcattcaaggtttccataaggtgcgtacgatggtacgcttcgcggttgatgggggaacgtttaaagatttggaggtgatagaacttgctgaccgatgatgtagtttgtttattttcaatggattgtatttaccgattgcttgcgctatagtgtaaaagccgttacatgctaatgtaaaggttgttacgctattgggtaaaggccgttacactatttggtaaaggtcgttacacgctgaggtaaagaccgtttcatcaaggggtgacggccgttacgcactgaagtaagcaaaacaatgtaccggagtaagcaaagcaatgaagtaaaaagatgaaaccaagccttcacttaatcgaatttttccattatctttgtacccgaatagcaagtagagccgtggggcatcgtcctccttcttattttattctccattttgaagtatcaccgaaaaagaactgaaatatgaaaggaattattcttgcaggtggcagtgccactcgtctctatccgttgtccaaggctatctccaagcagataatgcccgtctacgacaagccgatgatatactacccgctctctacactgatgttggcaggaattcgcgaagtgcttattatctctactccacgtgacttacccatgttccgcgagctgctgggaaccggcgaagaactcggtatgtccttttcctataagatacaagagaatcccaacggactggcacaagcctttgtgctgggtgcagagttcttggacggcggaccgggctgccttattctgggcgacaacatgttctacggtcaaggcttctccgccatgctgaagcgtgccgcttccatagacaagggtgcctgcatctttggttattacgtcaaggacccccgtgcctacggtgtagtggagtttgatgccaacagcaaagccgtctcgctggaagaaaagcctgccaatcctaaaagcaactatgccgtccccggactgtacttctacgactccaccgtgacagagaaagccgcctccttgaagccctctgctcgcggcgaatacgaaattaccgacctcaaccgtctctatctggacgagggcacgctgaaagtggagctcttcggccgtggctttgcctggctcgacaccggcaattgcgacagcctgctggaagccagcaattttgtcgccaccatccagaaccgtcaaggcttccgcgtgagctgtatcgaagagattgcctggcgcaagggctggatagatgtagaccagctgtatcgcttgggtgaacagcttggcaagaccgaatatggcaaatacctgatggaactggctgaatcgaagcgatgaactctttgttccccaaaaagagaaggagaatagttctcctataaaggcccgctgactttaatttttaatttataatttttaattctcatgaagacttatctcgtaaccggtgccgccggttttatcggcgccaactatattaaatatatcctggcaaaacataatgatattaaagtggtgatactggatgccttgacctacgcaggcaatctgggcaccattgccaatgacattgacgatgaacgttgcttttttgtaaaaggtgacatctgcgaccgcgtgcttgccgacgaactgtttgccaagtataaattcgattacgtagtgaattttgctgccgagagccacgtagaccgtagcatagagaatccccagcttttcctgatgaccaacatcctgggtacacaaaacctgctcgatgccgcccgccgtgcctgggtcacgggtaaggacgagtccggttatcccacttggcgcaaaggcgtccgttaccatcaggtgtctaccgacgaagtttacggctcacttggtgccgaaggctacttcacagagcaaaccccgctctgcccgcacagcccttacagcgccagcaagacgagtgccgatatggtagtgatggcctatcacgacacctataagatgcccatcactatcacccgctgttccaacaactacggtccttatcacttccccgaaaagctgattccgcttatcatcaagaatattctcgaaggcaagaacctccccgtctatggcgacggcagtaacgtgcgtgactggctctacgtggaagaccactgcaaagctatcgacctggttgtccgcgagggtgtggaaggcgaagtctacaacgtaggcggtcacaacgaaaagaccaatcttgaaatcgtgaagctgactattgccaccgtccgccgcttgatggaggaagaaccccgttaccgtacagtgctgaagaaacaagtaaaagccgccgacggcacgattgacatcagctggataaacgaagaccttatcaccttcgtcaaagaccgcctaggtcacgaccagcgttatgccatcgaccccacaaagattaccaatgccctgggctggtatccggagacgaagttcgaggtcggcatcgtcaagaccattgaatggtacctgaacaaccagccgtgggtggaagaagtgaccagcggtgactatcagaagtattacgaacagatgtatggaggtaggggttaaggtttagggattagggtctaaccgctaatccttaacccctaacctctcaattcagcgccaccgctaacagtaatcctaagaacagcatattgcgcgacgtctcgcccagtatgctgttcagctttttaccgctacctatctgtatcattttgcgccacgtcagtgcgtgcatatagagatagacgaagggagcccagataaattccagtggagtcagcttgcccgtgtagacaaaccagaagcagagcagcacggcggcgatgcccagtgccagatacatattctcaccgaacttcttgccgtagcgtaccaccagcgtacacttgccgcttacggcatcctgctcgcggtcgcgatagttgttcaccatcagcaaggtgtctatggcgaggccactgacgagcgacagcaccaccacatccatattcagcgtataggcctgcacgtagtaggtgccgcatacgggcacgaagccgaagaacaccagcaccagtacgtcgccccagccccgataggagagcagcgtggtatagaggaaagcaaacagtatgcacactacgcccagcaccaccagttcccagcctccgtggggcagctgcccccagacggtgaacagcactgccagccctgccaggcacgacagtgtcagtgcgatgccgatgccggttttcatggctgccggcgtaatccaaccttcggcgcaggcgcgctgcggccccagccggtcttcccgacggtcggtccctttctggaagtcgaagaggtcgttgataaagttggcggcaatctgcatgccgcaggcaaagagggcgcacagcagggcgggtgcggtcttgaactgtccgtcgctgaaggcaagggcactgcccagcaataccgggatgatggctcccgtcaacgtcttggggcgggcggcgagaaaccatgcgtagggtgaattctgtttaatctcgttcatcgtagttccaatttagttcggcatctgccagcaaaaatactgaaaatccctatatttgtacccacttatgatgaagaagttagtctacatatccattctttctctgctgctcttgtcttcctgccgttccaagcggatgattaccgtgtcgttgccgcagccagtcatgcaggcagacagcacgcagcttggcgatactatcgggttgcctgcccgcctttcgccgatgttcacctttgaccagtctgatttgcgtaatgtccgccgccagccggcgaagggcgaggtaaagaaacagcagataaagaaaacggcaccggtacaaaaggtaattgtgcagcgaggtacgagaatcacatcgaaaaccacccacgtaggctcggcctataagggcgtcagccgcattaagacgtacgacttcacgcatcgcgacgtgcctgccgccttcgagggcttccgcatcgcctttgtctccgacctgcactacaaaagcctgctgaaggaggagggattgaaggacctggtccgcctgctcatagaccagaaggccgacgtgctgctgattggcggtgactttcacgaaggctgccagtacgtgccgcccgtcatggctgccctggcgcaagtgaagacgccgttgggcacctatgccgtgcttggcaacaatgactacgaggcttgctatgacgacatcgtgcgcgaaatgaggcattatggcatgcatctgctggagcataaggtggacaccctgcggcgtggcggtgagcggattcttgtggcgggcgtgcgcaatcctttcgacttggccaagaacggcacatcgcccacactcggcctttcgcccgacgatttcgtaatcctgctgacgcatacgccggactatgccgaggacgtcccggtgacaaactccgacctcatcctggccggacacacgcatggcgggcaggtgacgctgttcgggctttatgcaccgatagtcccctcgcactacgggcagcggttcctctccgggctgaagtacaactcaaagaacatcccgatgattgtcaccaacggcatcggcacttcgcagaaagccatccgcatgtttgctcccgcagaggtggtgatgattgtgctgcaccggctgacggactga

SEQ ID NO: 1127 - DNA, 51077 bp, unidentified
  source 1..51077: mol_type = unassigned DNA
ctactcttgttccttatgtcttttaattgctttttgaatttcctgaataatatatttagctccaaccgatgcactactgccaagattatacacatattctttaacaaatcggtctatgctgtccttatatgtatcagaagctgccagcatctttgctgctgtatcagctgtcttatcaatttcatcaagcttaagtacacgcccgatttcatatctcatccatatattaagtggctcaattccaatctttttgtattcaggattcattatcttcattggtgtatcaatgaaaagaaccggtttacatgtagtataagcatattcatatgctatacctgaccagtctgtaatcataagatctgcctcaaaaacagtactgtttgatgaaaaatcagtctgaatctctatatctgtatcatccttatatctttctttaagtccttccatcttctcaggcatatgtcttacatgctgtgggtgtggtcggactgtaatcttataaccatgtcccttaagattatcaagtatgtcctcaagacagctgtctacaatattatctttctgccatgatggagcaataagtattgacttaatgtcattttccttctttggcatcttttcataatcctcacgcatctcatcaagcaatgaatatccccactcaacaagctccttcttaggaagattatacacttcttcagttttttctatttcttctttctgaatctttcctgtacataatacagaatcatagtgatccattgaaccggttcgcattgtcatattaaggctgtccatgccatgaggaacataaacataattaatatcttttctgatataacttctcttaatgtgataattctcaatatcaggcatagtcataacaacaacgtctgcatccatcttcatcataagtgttataagtttcttttcccctatataataaggtttaatcttactttctttttctgcaattctgaatatctgatcatcaggatcacttgttacataatggattgtaatattcgtattattaagtatgtattcaattatccctttaaaatacttatagaaacctgagccctctgaatagaagacaagatgtttattaacaacagagaaaaactttttataatcagctttttctctcttaatatcttctttgtttctttttccctttttcgtaccaagagcttcaatctctgcaagttctttcttagtttcctcaagagcctcataatcaatgtaattcttaggattaatcgcccagttaagaagatataactgaagaattgcaaatatgttgctggcagtccagtaaagagctactcctgcatatacaaagcatcctaaatataacgacagacctactgaaaatatcatcataccatacttattaagcttactctgttctgcctgtaatacgttacttgcattctgtgcaacacataaaagccatgctgagacacctgctataattggtgttattattgataatccccactgttttgtagtaatccatgtaaggtcatagccacagaacttcatgttcgcaacaccttcattaattccgtctttgataactgcaacaactccaagcagaagtattatctgtataataagaggtataagtgatgccagtggattatatttttcttttttataaagcttagactgttcctctgctatctcatccttatccccataatgcttaataagaatcctgttaatatcaggctgcatcttaaccattttaattgaattcttctgtacccagattgatacaggtaagagaacaatcttacttatcagagtgaataatataattgccaatccataatcatgcagtaatttgtaacaaaaattcattacataacctaaggctgtcgataatatttccataaataactcctcttttgaagattttattgattgtgtcagagtcatccaatataataattaatcatatcacttattatcaattattgaaaggtgtttttacatatccgatatactttttttacatacccaatataaattttacatgttttgcacacaaaaaaaggacattgttcttacataatacagtgtccttttaatattatttatttcaaaaggtactcagcatatttaactgccatgtctcgccagttctccaatgcctcacccatatctgcaccacatgattccctgtacatagcccatacaaaccagtagtacgcaataatagcaacatatgccatataatgaaatcttgttgtctcattatattcttcctgaagatattcctttatgaattcctcagccttatcaaaatcatacatggcatcaacaacataatatccaacatcaattcccggatcagaatatccagaatactcccagtcaataagaataacgcttccatctggtcttatcatccagtttggcttgtatgtatcaccatgacagaaacattttttaactccatctccaagagtcatcttgtaaagctgtccgatacggcttttaagctcctcatactggacaaaacacacagggtccttcttctcaagaagcttctccatatcaagcgcatcttcccatggcttcataccataatcagctgttatatctgccttatgcagctttcttaaaacagtcaatatcttctttgagtcctcaaaagaattataatcaggctctctgaattccggaatgaatatggatatcttccagccctcattaacatctgcatatatgtatgtaggatctacaccagcttctttggctttaataagtgattttttttcatttcttctattaattatactttctgttccatcgcctggatgtctgtatatataatcaattccgtcaatcttgaatataaaggatgtgttggtcattccttcgcttacatttctgaaatcaattatatcctcctcatcacatctgaatacaagcttgatatttcttattatctcactgtgcgtatgtccaagatactgtgaatcaaactttctaagctcatcaaaataatcaaattcaaatatattacccggaagatattccttaaaataaatatcaggcatttcatccagcttatcctttacaagaatctcccaatagcagttattatatattccagattcccggacagcctcaacctgattaataaatgcttctgagaattcttttctccagaatgaatgtcccataagaacatagccatcaatcttattatccttagcaattcttgttatctttccaaatccatcagctcttgcatatacttcatccgttgtttcctttccataataacctgaataaaatgtatgatattcaaactgattaaacggattttctatataataactgtcacttacgcatatgtacgtattcttaagttcttttcttgcaagataaagactttcaatattattctttatattaaatgaatcattaataatgaactttacaccatacttgtcttcaagatagtaaaacatctccttcttatagccaagtacaactgtaatattcttaataccagcatcctgaagctgctttatctgtctctcaataagacgttcaccctttacttcaaaaagaccctttggctgttcgagtgataaaggaataaatcgtgtagatgcgccagctgcaagaataacggcattattaaccctgtatggttcaagcgcctctaatccagtctttgtaatactaccagactctttttcaatataccctgtttttacaagtttattataaatatctgtgtcattaagagcttttgtcgcctcaacatcataagtacagccggctcttccaatgcttccattatacaaactgttcaatacataaaactcttcttttctcattatacatatctccttatgccatgtttcctgagaacattcctcgaatcactgctttgattacattttctctgcatgattcatacttttcccccgaaagtataagtccctctaccttaatgttctttatatccttcttatcaactgaatacaaatcatctgaaagaaccaccatatcggcaatctttcctgcctcaaggcttcctctttctttctcgtcaaatgttacataatatccattatacgtacacatccttagtgcttcctgaaccgatactgcctgagactgattcatattattaacagctttgtcaatccatacgataggatccggtgatgtacatggagcatcagaaccgcacgaaacaactattccattctcattaaatgttctgagcggattaagtctttctgctctttctttacccataatacttttaagatactcatcaggttcctgtttccagttaatgaaagcactctgtacaggcatctgtatattatagtccctgcatatcttaattccctcttcagttggaagacagtcatgtataattccatgtctgtgatcttttcttggataatcgtcaagtgccgccttaagtgccctgcatgcctggtcaaatgctttatccccaatcgcatgcatctctatctgcagtccggctctgttagccttcttgcagaaatcaataaccttttcatcatcataataaagtactccgtcaccgcctaaagaatcaatatatggttcattcatagctgcatcgtgtgaaccgaagcatccgtcaagcgcacattcaaaacacccgcctattcttggcagttttctctttaatgcgacatcaacattcattgactgtgggaatacccttacctgaaatccattagttaaggattttgcaaatattttttcaaatgtaatatcaagattgcctgtaaaacccacaccacttacagtatgaatacagccaattccatgagacgcctgaaaatcaatggcactctgcatattcttaaacagttcaataatagaaagtgaattggtaatgtaattagaacattcaaagaatgcctcctgattcatctcacctgtatcttcgtgataacctctcaacttacttactttccccttcagcttatcaagaagcttgctgttaattatgcacgcatgtccatcatatttgacaaccatgatttccttatcaggacataccttatctaattcttccctgcttataagtcttccttctttaactgaatatggtgacgcaccaaatgctataagtgtttttttattaccgcttgacttcacgaattctttaaccatctgtgcaatctcttcattggactctgcatccataacattaagtcctgcgtgaaatgtagaaaatgatgccatatgctgatgtgtatctacgaatgccggaaccagcaccttctttccaagttcaactgtctgcacattcttatactgttctggcagttcattaccaacatacacaattcttcctttatcctcaacgagaaaaccggctactgtatcattactgtcaactgtaagaacctttcccttataacatatcatagacattcaccttccctttatatctgcatttactgttcctgtcccggataatccttataagaagaatctaactgtaccagctcataaaaattatctatctccataatatctgatttctcacaaggtcttacctctaccgcatatctttccttgcgaagcacaagtggaataaactcccagaaataatcattgccctccggctcttcattatatacctgtgcaaagtcttctcttaatcttgcactgtcttcctttgtccagtaagatattccataataattaaagcaatatgtattacccttctgataatctgttatatgtccattatcaagcttaaaactccagtcatcagtctctaacgaataagagccaaggatattgctgcagtactgatactttgtgataatagccggattagatatatacaggtccgcttcacataaatagcactggtcaatatgttctaatgctgccattgctgatgatatattattggttttatcatatatatcgttatcaataagattgataaatggatacttctccagaatctcatcaaatttttctttcttataaccccttacaagagttatatccttaattcctacagaaacaagtgcatcaagtaatgtatcaataattcttactccattaacagcaaccattggctttggtctgtctaatgtaacaggaaccattcttgaaccaaatcctgctgccataataaccgctctctttactcggtatggctcaagtgcctcaagacctctttcagtaatctccatctgatcttcacatcttttaataagagcttcattttctaactcatccagagctttagatatagctgttcctgaaatctttaatgtatctgaaagagttctcatcggatactctttcttaccgttcttttcaatatatgtaagtacttcaaactgataacgattcatatttcctccttacagcaccattggaattatatagattccaagtgcaatgcatgtaacaataattgtgcataccttccatatggtgtactgtctgtccatcttagccttagtctgctcatccggctcttctataacgccaatctcttcctcaattgtcggcataacacactcttttctgtgagaatatgcaaaatagaatattacacataatactgttataattcctgatgtaataagtgctgccttatccgcaaatattaacatgaagcaatacacaacaattgtaaatatacatccaacaactccaagaggagccttataaggtctcttcatatcaggatacttcttcttaagccccatatatgaaagacagcctatcatataacatatagcaagtgatataagcgataccgatgctatgtaattaattgaacctgttgcaataagtataaaattgataacaccaaccacaattacagcaacatatggcgtcttgaacttcggatgaatctttccaaggaattttggtaatgcgccatcttctgccattgtataaatgtatcttgcaggtgcagcaattcccggattaatagtagataaatctccaccaaatgcaataccgatacataaaagtataataggaaatccaacaagtccgactgccttaagtccttctgcatatggagcatctgccgctgcaagaattccataaaactccttaggtacaagacctacaagaaaccactggaataatgcgttaagtgcaaataccataaataccgaaatctttaatgctcttggaagtgtatactgtggatacttagtctctgctcccatagatacacatgtctcaaatcctgtatagcaccaccatacaagaccaaatatatacatcatctcattaaatggaggcaatgagttcattgctattccaccaaaatattcaacatgaaccttaggtatcatataaaggaaccagcacactgaacagccccagaagaaaaacataaatgctgtctgcgccttacctgactgctcaatacctctgaaattaagaataaggaaaactgcaacaaggataatagctataattcttgaatcaagcttaacgatgcttattccaagctgttccataagaatcttaaaataattggcaaatgcaagcgtctcacctgcaccaatagctacaacagatactatataatgccatcctgccatattagcccatactctgttaagtcctctcttggcataattatatgttccacccgcacaaggaagtgctgcagacatctctccatatataagacatggccatatagatataagaagtgcaacaaaggtaaatcctattatccatgagcctacacttcctatctgtgctgaaccacaggtaaaaagtcctacacctacaacggttccaattgtcatactaattgattctttaagccctaaagcacgaaccagctgattattctcattcataaatatcccctctcacagtttattcgttcagtcatatttttgttcattgcgtgaacagaatggattatagcagataataaactaaattaccagtataaaagtaagcagctataaaccttccaggcttagctgctgcttcatcattaattattaatattcttcatctgctgctcatctttaattacagatatctgtggatttacagcgtccccttctattctgaacaccgaataatctctgtttttaagatattcatctgccgggtacataccttttgacacatcccatggtgctacatgatatcttgactgagaaacaccagccatatcaaaaagcgtatttccataattactcttctgtccaagtgctgccttgccataagtagcatacagattcttaaatgttacagaatctgaattaacctgcattacatcattatgagtatcagccattttcacaaatacagcaggacgttcatacaatccatatccgccgtggtcggctgtaattataaccgtgctgttatcatacacacctttatccttcatctgttgcatatattcattaatatatctgaaaacaccctgtatctgcttatcaagagaagtctctgtttcccccacatctacacactgttcattcatctcataaggtgcatgtgcccctaccatatgatacagtgtaaatgttttatttccagcatcaactgttataccgccattattcttaaaatcagcatacaactgtgaatcatccagttcatattgaataacattgttattctttggagcctgacatgctgcaaaatcatcaccataaaaccagaaatactgttttataatctgtggaaatgcataaaatgccgacattttatatatattcttaaaaaattgcactttgtctgatatcctgtatttctgtccacctgcagtattggatactgcctcctgattaactccattaagatactcacttgaagtatacaacttaacatcatatccgttatctgacatatcctgaataagagtaccttcttcatatgctttctttctgtaatcagccaaagaatgtgttgtatcatactgataacctgtaagcataagtggaactcctagagctgttggtgcacctccgcctatcatattatcaaaataagtaaaatcttttaattcttcacagtatctgtcgataacataattctgtgcatcctcattatccagtgtatccacaatgaataccactacattgccctgcgaagataacgcaaactcatcattcttagtaactacatatgaataatcaacacttctttttgaagatacaataagaaccacaagtgtcacaacctgtatgcttgaaagaaacaggctgccccactttattatatttgtcattatatctttcttaaagcatacaataactggcggaacaactataagtactatccatacaactgtacttataattccattaaccttaaactgactccactgaatctgccttccattaaggactccgaaatcaggattaagaaaattcccctgcacataagcagcaagtgcaccgccaaatataactgctgcatatatgttatatatcttctttggcacaatcagacctatcagtataacaaatgccgccgtaattaacgacgctgcgataagaagcggtataagtgccgcgaatcccactgcaaattgatcaatattgccaagaaataaagatgatggcataaatatacagaatgttacaataagaaatatcaattgaggataaatcgttattaatttatcttttatcttcttcatagtaatctccctgttagttagctgctgctttcaatgaattaagctgatatattctccatccgaattcatcatataatattgaataattgtaatatttctcaaggaccttatcaaaatcatcattataagttcttgatgcaatatatttaacaccaatcttctcggcatctttatagttcagattcaactgtaaaagatcctgctgaacaagttcctcattagtatcctcttctgtaagtgtaagtaacatatgtgcaaatctgttataacagtattcattctctttctgtggatcaagaatattccataaatcccagttaggaacattattacatgtattaattgtcggagcaccacaggcagcaagatacattgattctacccatgaatcaagcattacccatttaccatctttatcttcacttgtaatctcgcatactttcttggcaagtggtttagaatatatagcgtctgttcctacattaactgtaagtgaccatattcctgataagaacacaatacccgcaagcgataacagtgccatattcttaagcctgtcatgctcttttacacagaatacaacaatagttattactgtaaacacaattgccagcgctattattgcatactgtaacattccaccagactcagttatatcatatacagttcttgcttctttccagctgtaataacagcttataagcattggaaccacaacaataacaggattgactttatatctgttttccctgcatacatatatacatcttataagtaatataacctgtaaaagtcctaacaggtctgctgctctttcttccggtacataactgaataatgtgagcctggcaacaatcaatgggaagccaactgtacaatatattgtatatacacatgacaatccaagcatgatatctagaagaatatccttacccttctgcttaataatgcagtacactgccattaccattggcaatgggaacaatgttaccatcattgagaactcactattattaagagttgccttgaatggatagaatattgtagcaacatattcaaacatcttatataaagaatatccaccagttgaaactcttgaacccggatagattgtattcattatctctgttacatatgtgcttctgtccttgatgtacacaataacaattgatgccataaacaacattgatgctgcgaatacaagccattccttaagcttgattttcttgaaattatcccatgaacttacaaccatccatactacaattccaaaataaatatatcctgaaggcacctggaatgctggatatagtattgttatatattcagcgccaagtatggcaatacacgggctgagcaccatcctctgccatgtcttctctgcatttataaagtaatatatacatacaagtgctgtcagtccgcaggacagatactcaacattcatccaccacatttcgtatccagagaaggctaccataacgcctccggttactgccagtactttattctttcctgctataatgtaaaagaactgtattgacataacaataagtaatataaatgggaaacaccattctaccgacatacctatgctgtctccaaaaaagtaatagccccatgtttgcggtttagccagtgctgaatatgacttatacaatccagtctgtgctatattttctgtctgcttccccataattatataattatatttaccataatcagtatacttggctgtaagatatcttggtgttgaaacagcccactcatcacttcttatagaatgtgtctctccataaacaggcgttacaaactcacttccctgtcccggctgcacataattatcaaacattcctatagacgagaaattaaccctcataataacaagaagcaaaaacattgcaacagcaatatagaatctcttatcaaatatgaactcacataatttcctaggtccagcaataataaatgcacatacaagaatcataagaagtgtcataaacaccattcttactgcaaacacaccataattatcagtatggtggtaattccttaaaactgcataacaaagtacaccattctgtttctctccgttaatgctgtactgcactgatgtatctgttatattctgattatctgtccacaatgtaaacttctttccattcgctgatgtatccgtagaaacctttagcgtataagtcttcccacctgatataacatttgtctcggcaaaattagaaaactggttatcattgatattgactccgctcaccttctggtggaatacaacttcacctgttgtcttatctagaagttctacagttatcttagagaaattccttatggcattagtgctgaaataaagcgctattccattgaaatccccatcaatatatatatcctgggttatctccattcctttctctaaaccggcagtctcctgtcttgctgcaaatcctgaatcatacatatctgccactttatcattagtaacattatatatgtgtactcctcttaatacgaacaatactgccacaacaacaagaagcaatatcttaatgtattttgatttattcttcatgtgttttaatctcctaacaattttaatcgttttattatatcacgcaattataaatacatacaagtcctttaccttgtcttaacttttcaattcatgtataattcagtaaatacatatattaatggaggattgtcttgaatttcaatactaagaattataattacaattttattagatttattgcagctttaatggttattatatcccactcatttgcattatcactcggtgcttcatcacagcagtatatagatagccatcaccttaatcttattaatatcaacacatggggattccttgctgttgcagttttcttctttggttcaggtttctatattgcgaaatcatgtgagcgcaatgaaagctttctggttttcttattaaagagactgtttaaactgcttccgatgcttatacttgttgtacttatatctatattcattataggacctgtattcacaacactgcctcttaaagattatttttccaatatacttacatggaaatatcttttgaacggaatactgattttacagcataacctgcctggtgtatttaccaataacgtatatatgcctactgtgaatggcgctttatggacacttcctgttgaattcttatgttatctgttctgctacattttttataaaatctttaagaacaaagataatattgtaaaccgtataatgcttgttttatcagttattgttatattaggtgctttcctgttacagagccacatatcatctctttatgatgctttatgtccggctatttcattctggcttggtatccagtactggattaacagagaacaccttcttaatattaagaaacctcaggttttattcatagcttcgattattttatttgttcttgtatttccggttaagagtctttctgcacttgccgtatggatatgtgttccttactttatgttctatgtaatgttcatcagtaagcatcagcatttccaaaaagcggaaatattaggtgactgttcttactgcatgtacctcataggattccctatacaacagagtattgtatatgtgatgggaggcggtccaatcaatccatttatcaacattattattgcgataattatagatatagcaattgcccttcccatgcatatctttatagaacgcagagtcgagaaattaactaaaaaaacattaaaaaagaagtaagaaaaatggttcagacatcaatcaatgtctgaaccatttttcttattattataataactattcaaagcaatctcctgtgccatctttctgactctttctgaatttcttgaaagtgacattgtaagtgagaatataacaagtataataaagacaaaccctaaaaagaacaacatattaatctcattatatattcccagtgccttagatataacattaagaagattaggtattaacgtaattataaatatcccaagctccagaaaaagccatgaaagtgcatattttaattccagtttgttcttcttgataagacctaatatctttaacagtcctaatataagaacaacaattataacgcatttaattcttatactcatctatgcttatctcctctgaaattctcaaacaatattgccagtgtaaccttaaccatataatatactgatttcttaagtgttattgatgagcttccgccctgtctttctctcatgacaactggaatctcagccaccttgaaacctttctttaatattgccacaactgtttccggctctggataatccttaggatacttcttggcaaactgtactattgtacgtcttcctataagtcttaatcctgatgtagggtctgttatcttctgacctgtacataactttatcaagccagtgaaatagttaattccaattcgtcttgccttagatgactggaatccctgtttttctatgaatcttgaacctataaccatatcaaggtcattcttttcaagataatcagccatctctccaaggaatttcgcatcatgctgtccatcaccatctacctgtacagcaatatcatatccatatctttctgcatacagatatcctgtctgaacagctccgcctattcccagattaactggcagattaacaatattaaatccattatcttcacatatctgtcgtgtattatcagttgagcagtcgttgataactacataatcaaatgatggtgcattctctataatatctctgactgtcttctctatactttcgctctcgttatatgctggaattattataagttttttcatattttctccataattgtccatgctttaaatatcaatatctttcagctcctcatcaaatggtccgaactccagaacctcaggtacatgattctttctgctctctactggtggcatcttcatataatcgccaaacattctcttaagaaatacatcattattcttagggactttaaccattatatcttcaaatggcttttcaaccaatgggaacaggtcatctaactttatagcctgctttaaaggatccatctcaccaaagaaacatgcaacccatcttgtcttctcattgttatacttaagtgcgctcttcatataacgtctgttgatgagttttcttgagaaatgtgtccatgtaagtaatctgttcattactatacacattgcacttacaacttttctcttccatccatgcatgaaaagcacaggtttcttgaattctcttaatattcttaacttgctccagaagaatactgatgatctctgtcttcttctcttcttggcatcatcaggaacattatcataaggataaagcgcaatatcaattcccataggaaccttagcatccttgaatacatatggtatattcttagttccaattcttgctatctctgcattatagaaaggaaatgtttcctgtgaatctatatcaagtactacatacttatctgtgtatttctctctatatatcttcagaaccttctcataatcatctctgagcattccgatatctatatcatcatcccatggaataaatcctttatgtctctcaactccgattgcacatcctgcaaacaggaaatatgaaagtccgttctcatcacatattttaataaaatctttaaacacctctaattctgcaagctgtaactttctcaggacctttggatcatactgttcattctggctcattgtctttttctatcctttctaatctggtataagatatatcccatcaataatacgcctaataacacaacaagtatcagatagccgagtgcagctccgttaagaccaagtctgcctgtaatcggatccataataatcagcgcaactccgcatacaataagatacagaatagtcatgtatttctgcttacgcattatggcaagtacataatagaatattatattgaccgcattaacgcctccacataacagaagcagaagcagtgtcatcttgtaatccttaagattaacaccataaagccatgacagaaccggtattcccagtatatatgccccgacctcacatataagtgtaaatcctgctattatagcaaacatcctgaatattatgtgccagaaattcttatacttcttctcataataattaacagccattgatgtctgcatcggcttaaatattataccactaaacagattaattaccatattaggcatgaataccgccgtataatacagctgtgctgcatcacctaacattctgtcaacagataatttcgatgaattgataatatagttacttaaaaatgtgcttatagcaagaggcagacacactttaaaaagtacgaaaactcttctgtaatccctgacaatacatatcttaaccctgcctgctgcaacagatgcatcaagacacagaattataagcaatgcaactacattcatacatatcagagagaatatcagatttcttgttataattactgttacaacaagaaccagtatactgaagaatatcctgtaaaactctgatttaccggacatatctattctttcctctttctggaattcaccttcaaatgtatcagctaccgaatcaagtatcttatagatacatacaagcaatataacagtaactttctccggactgtagccgttaaatacaacgtatactatgcttgccagaaatgttataagacacatcataagtcttaaagtgaaataatatccaaaaggatactcattcttaacatcagtaacctgatatgttcttatttcgaaataggctattgtaacaagccactgtgcaattgaaagaccaatcgagaacattcccgctttagcctcacctaagaaacggcttataacaattgtcataacaagcgtggcaagtgcgaaacatgctgttcccattgtaaaccagatatatttgtacttatcttctggtgtcttatccacacccattattcttgaaataatattcatatatacctcttagtctttaaattccaatttatatgggtaatgattctttctcttttcaactggaggaagctgcatataatctccatacatatttcttaacttctcatcttcgttggctggaagaggcatcttaatatcttcaaaatcatacatctgtaatggatatatctcatcctttaacattatatgataatatggatctgtatcaaataagaatgccattctcttagtatccacatcattatatcttgatgcaatctttaagcatttgccagcaatccagttatgtgaaattctaaacacaacaagtccggcatgaataattgctgttgcaatatgtgttatcttagccttaactcccttataaggaagtaccgggaacgcaacatgtctgagaataagaagcttgctccagaaccaggcagctttagcctgctttttaagttcttcctcatcatctgatatattatcaagcggatacacatcaaggaatattccaagatcacatttgatattcttaagaggttcctctataaatgttgttcctttcatcataattcttgttgtcatcaatggataattcttcattgtttcaacattggcaattgaatacttatcgctgtaatctcttttaataacttcaatcatcttgtcgaaatcttttctaggaagcattacatcaatatcatcatcccatggaatgaatcccttatgtcttattgccccgattcctgatccggcatcaccaaaccatgtaagattattctcgtcacacactttgatgaaatctctaagaatttccatctctgtctgctgtacctttttaagggttgcctcatcgtattctttcatcgttaactcctatccctgcttcatattattagattcttcactcttgctgtatgccttagtaagcattttagcaatacatttgggccagaacttctgatacataatgtaatcttcttcagatctcttattatcattaagaatcttagttgtctctgagtcctcatgtattctgtgatatgtgagtatcttattacagaatataaagtctcccttaagctttgataatctctcccatgcttcccagtcttcatcagctctgaatccattaaggaatacctgcttcataagattaggtctgtaatatgttgctgatggacaacatattggtgagccaagcgataacactcttcttcttataaatctgcttccccacattgcctttggacgcattatgaaaagcattattctttttactttaagaatcttattggttgttacaatcttgccatttcttatctctgcataatcggtaaagaaaagcagcggctttttagctttagctgtatacgctaacagattctctacatattcaggcgcatatttatcatcctgatgagctatagtgacataatctgtctgtactttagaataagcaaaattccaatcctgtgtaattccgctttctccctcattgacatacacctttaaattatattttgctgctatgtcgtcaatatacttattaggtgtagatgtagcaataaatatctctgactttacagtctgttccataagtgatgtaatacactcttcgagatatggactctccttataagcgcatatcgcaaatgtatgattagtattgacatgttcctttgtcattatagttcctccaaacgccttgttttaagcatatgtatcttcatactatcttctacagatactcattctttccttcttcacgaagctttgcaagtacctgcttgatttcgcctgcattctctttagttgtaataagagttgcatctttagtatcaacaactacgatatctcttaaaccaactgtggcaataagtttttcgccaccttctattacacagcccctagtattaactgcaactacattgccgttaattacattgctgttatcatcattcttcttgattcttcctactgcaagccatgaacctacatcatcccaaccgaagttgcctggaagtgtgtagatagaatctgccttctccataataccgtagtcaactgactgtgactcaagattagggaattctgcctcaagcactgcattttcatctgctgttccaactgctgccttaatctttaataagccttcatatgtatccggcatgaacttcttaaagcagtctaatattgtagataccttccatacgaacattccactgttccacagatatgttccgtcagcaaggtatgatttagctgtctcaaggtctggcttctcaacgaacttttcaactgaataagcattattcttcttgtcatcctgattatacttaatataaccatagcctgtctctggataattcggagtaatacctaccgttacaaggttagccccctcttctgcaatctgaacagcttctttaaatgtatctgcaaacacttcattattcttaataaggtggtctgatggaagtacaatcataactgcatcatcatatttgcttgcaacatgaactgctccaagacctacacatggtgctgtatttcttccaacaggctcacataagatattctcctctggaatacctggaagctgctgctttacaagttctctgtagttcttgttagtagcaatataaacatccttaatatcaaccaatgggctgattctctctaccgtgagctgtatcatagtctttccgtcatctgtaagagaaaggaactgttttggcatattaacacggctctttggccagaatcgctctcccttaccacctgccataataagtgctgtagtcttcataaattcctccttgttctgccatattgttttaaccatcaattacgacatctgtctgtgcatcataatatttaccatcagctctgatagcacatctatatgtgccgctttccatatctgttgtatctattccacaaaaaaacggtgcatagttaatgttcttatccacaccttttcttaaatgaaatactctgtcacatactgactgtgccttaatcctataacaattctgttcattccacagaaaaattacgggattataatacactttatttccgttatatgcaaatcccctaagctgcatatcatcatgataccctgtttctgtcaccttaactgtaggtgatacttccatatatcctgcagccggccttaatctgtcagctttctgaggttttctgtatattacagaatatatctcatctccgaatctgtagttattctccgtctgcgtaagaagcggactatagaaagggtcatatttctcaagctttggatgtttttcatatgtcatatcccttgcatgcatattacgtctgttcttttcttcatcaacctcatcatcacctcttgagaatgattcatggtgaaaaaggaccacgtcatttcttaagacattgtaatatccctgttcatagagagtcaggcatatatcaacatcattatgtgttacttcaaatgcttcatcaaatccaccagctttatcgaatttagccttctcaatcataaagcatgctcctgtaacacacaggcagtcataatcagcgtaattcctgtgagccttgatattctcatcatcaactgcctttgcatacagatgtgcaaaacagcttgattcataattaattacacccacatgctggatatatgatgagtccggatacagaagctttgcaccaaccgcgccggtactttcctgctttgcctgtccgacaagtactgaaagccagtctgtatcttcataatcctgtccgattatttcaatatcatcattaaggaacagcaacagattaccttttgctttagctgctccaatattacacatatgtgagaaattaaaatctgccttttcatacacatatgatgcctgtccttcaaatgtatctacaagcttctcatactcttttctgttgctgtcattacttccgttatcaacaacaacaatttcgtaattaatatatttcgtgaacttgcggatactctgtaaacagcattttaatatgtctggattatcctttgatggaataattatactcaccagatcatattcattcgtaatgtaatgcacatgctcaactgctgaatcatgcttatctgctacgatgttcacattaatttctgaactttccagaatcattttcttaaaagctgccattccgtcatcagcagtcctgtatgatttactgtcagttcttatgtccttaacaagcacttgatggatatgcccaacatctgacgtcttacactttgaaagaattattaaagacaattcataataattaatattatcaaccgcgccatgattcttacattcattaatagcatctataagagcattcttctttgcaacaaatgcatcgccaatataattgtaagataacagtgtatcccatgaataatcaggcttgcagtcaggaagtccgcatccagcttcctgattatacttttccgaatcagtatatatatatataagactgcgtcctgcccttttctgaatccttatataatgtgaaacaattgctgtataatctttatcgaattcacagctttcatcacacacggctatatattcagcatccattccagacactgctgccagcatgctttcatagcttccactatgtctgcatattgctgtgcagtcagccttattatcagtaatacgctgttttggtgcgatttttttctgataaatgccatagactttagcatctgtcatattctgatgcatcttctgttgtaatgcatacccgaatgtcttaaagccttcttttccaataatctgcgctgctctcgttaaaaacatttttacctctgataattactctgaagccaatacatacgcctctgttgtcattgggaaattcctgttgtaatatggatctccctcatccaattctttctgccatttgctttggaaagtttctatctctcccttgaatcttaactgcttttctggcgtatcttcatatcctcttgacttggattcataatgataccactgtgaaaatgcatcatataccacaaggtatcccttgcttctgactttcatgcacaagtcaacatcattaaatgcaacggcatattcttcacataatccaccaacttcatcaaacactgctttaggcaccataagacacgctgctgtaactgcagtataatcacatgacaaatatgctcttgacatataaccatattctttagcatcgagacctataaacgcatgtcctgcaattccacctaatcccagaataacaccagcatgctgtattgttccatctccatatattaatttagagccaacaattccaacctcaggtctcatacagtatccaagcatatctccaagagaatctttgtccaatatcttagtgtcgttattaaggagcagaatataatcaccttttgcctcttttactccgaaattattaattgcagaataattaaattctctctcccatgtaagaactcttacattatcatattctttctgtattttattataataatcaaatgtttctttttctgtgctgttattctctactataataatttcaaaatttctgtaagtactcttctttaatactgaggtaacacataaatcaagatctttataatgatctttgtttggaataacaattgaaatcattggatttcctggtgttgcatatctgattctgtatcctccaaaaagtttactaagctgaacctgtgcttctattcccatcctgttaagatgatcttcgaccgctcttcttccagcttcatggcaatacttcttgctttctggattagctgctgttgaattactatgcattctccaatgatataatatctttgaaacatgtgctattttatgagctttttccgttgttctaagaataatatcataatcctgtgccccgtcatacttatcgctaaaaccaccaacttccttaataagttcagttttaacgcaataaaaatgagtaatgtaattgtatgaacgaagtaagtctatattgaaatcaggcttaaaattaggattaacatttttccagtctggtcctaatattttatcttcatcagtatacacaacatcaacatctttatcctgtaatgccttcaccacttcatataatgcatttggttcaagtgtatcatcatgatctaataatccgactatttcaccttcagccatatcaagtgcagcattagtatttcctgctatacctagatttctatcaagaactttgtaaattatccttgaatctgctttactgtacgcatctaatgttgcctcaagttccttatttccctgacttccatctgcgatacataactgccattttccataactctgcgctataacagaatcaatcatttcctttaagaatataatcggtgtattataagttggaactataatgctaataagtggctggtattcaaagttttcattcttctctctttccagctcttcctgagttaccttatgatctgtaaaccatctcttatatataagctcctgattattgcctccatataatccactatatacatattcccttaaatcagaaaatccatatttgccaatatatttacagagacttgctacattatgaggtgttattgctcttatgagtctctttgtcttatctatgttatgaactcttctttgccatttaagttctttgtctatatcgatatccttctgagcagaatctgacatgaattttaatatataaccatctttttcttctacagatattgtaaatccatatgctttttctttatcttctgtatatccgttatcaataagatcatgtctgtcacatttgacataggtataatcaacttttttattatcgcgatttacaacctctatgcttatatctccttttgacaatacccaaccagttattctatacacagtatctccatctggcgtattctcagcccatatgcaatctatattgtactgtaaaagctgatcttcaatagtatatcctatatctttattgtcaagtgatgcaagttcttttgtttctcccgaatcaacaacaaaaaattttatttcattaatatcagttttatctgtatcagccttaactataaatcctatttcacaatctctgttaagacctctctctagcaattcatccagcttgtcttctcttgttatatgctcgatactacactctgtcttcttgccattaataagtaattcaaatgaataatcattaaaatccttaggaatataccagcctgcaattctgatatgaagttttccctgattatctgaaagctgtacattaattacattattactctttttcatagccactacctttcaattaacagttcttccatgtatgttcaattcttgcaacacccatatcttcaattcctgatacaacattaaatcttactgcttctttatagtaatcaattggtgttccatctgctttttcaagcacaatatctacccagtactggcttcttgtaagtgtcatactgtcaaactcaataacaatctttccatctttgtcaaggtcaaatgcatcaagtctgtctatcttagtactgcttccgctgcataactgaccatcaattctataaatcatatatcttgcatgaacatcttttaccggagtctcaacagaataatctatctctatcacggcttttcttcctgtttcaagagtttctgtcctcttgccgtcatcacaagacaagataacgtcgttaattcttgcctcgaaacttccgtaacgtttatcgttaccaccttctttattctcttcctcaaccttcttaagtcttctctgctctgcttcaattcttaagattctggccctttcctgctcatccttgcttaatctttcctgattcatataatcaagataagcaatgtcaacttctcttggatcaccttcctgctcaatctgtccatctttaatccagattgacttgtcacatatctcttcaatctgtccaagggcatgtgatacgataataatagttgttccgttagccttaatctctcttaacttgttgaaacattttgcctgaaaattcgcatcacctacagcaagaatctcatcaataagaaggatatctgcattaacattaattgctactgagaatgcaagtctcatgtacatacctgatgaatatgttcttacaggattatcaataaactgctgtaattctgaaaactcgataatatcctcaagtctttcatctatctctttcttagtaagaccaaatatcgcagcattagtgtatatgttttctcttccactcatgtcagggtggaatcctgctccaagttcaagaagacttgaaactcttccgcacatttcaatagaaccgctgtctggatatataatcttagtcaacagcttaagtgtcgtactcttaccacagccgtttcttccaataagacctactgcctcgcccttctttactgtaaagcttatattattaagaacaactctgttttcatatctgtttctcttccagaacagcattttctctttaagttcattacctttatcaaaatacactttaaagcttttggatacattccttacttcgattgaattctcgttgttaagcatacttatctctctttcttaaacattaaaactcttctgcgaatccgcgctgaagtcttctgaatataattgctcccagaataacaaaaacaacgcctgttataatagcaaccaataatgtagacaaatctggaatttccttatagtaaagaatctgtctgtatatattgattattggtgtcattggatttaagttaaatattgtctttaatatctgtggaacattagcattctctaccatatcagcgccatacataactggtgtcatatactgtaatgccataactacaattccaagaatgtactgtaaatctcttaaataaacagtaagtgcagaaactataagtccaattccaagacataatatatattcaacaatcattacaacaggaagatataataatgcaaccagattaattcctcttcctgagataagaagaacgataaacacaacaacaaatgtaagaatcatattaatgaatgcacttgttactgtagatattggaataacctctcttggaaaatatattttcttaaccatgttagattcacgcattatacatgttgagccatcctggacacttgagccgaaaaacatccatggtacaagtgctacaaaaaggaatagataatactgttcataattggctctcataattattgagaaaaccaacgtaaacactaaaagctgtaacaatgggttaataaatgtccacataaatccgagcacagagcccttgtatcttccacgtaaatctttctttaccagagaaaatatcatttctctgtattcatacatttcctttaaatgtttcataaatcctccatttaattatggctgtcagaaattcgcatataagaatccgcttccagcattacttgcatatcccataacaaatattgctaatataatgccgtaatatattagccaccttactactattggctttgctgcaactgcaactctaatctgtacgcctctttctttgaggacgcttattattaatacaacaacacatcctgctaataaaaatatataatccactgatgttaatccaatgttcttaaacattgctgcattaagctggtcaaaccgtaaatctgttatcattcgctttatcattctgattgcagaacccatacctgctacactgcaatcaaatacccatccgatattgacaagtataaatgttcttaatatctgcacacactgccaccacttcttatgtgggttaatatgacatgcatgtaagcattttttataaagtggctctacaaggttactgaatgctattattacaccattatacataccatacatgatgtaacgccattctgctccgtgccatatacctactataaagaatatcagaagattagaaagacatattgggagagtctttccaagatgatctccaagatgcttcttgccccactttccgaacttgttcatagcctttgataaacagaatggatagaagacataatccttcatccatgtacccagtgtaatatgccaccttctccagaactctccaattgatttactaaaatatggctgtctgaagttctcatccatagttacaccaaaaagctgtgcaacacctattactatatcaataccgcctgagaaatccgcatataactgaattgaatacataagcaccgctattattgccattgcaccaccatattcatcaggcttattaaatattatattaacgaatactccagctctgtctgcaagaaccatcttcttgaacaaaccccagaatattctctgaattccaaactgtacattctgaagattaaatgcacttcctgcaaaaagcgttttctgcagcttatcaaatcttccaattggtccctgcataatctgtgggaaaaatgatacaaaaagacatattctgaaaggattcttttctgctctgtatttcccctgatatatatcaataacataagatattgactgaaatgtaaagaatgataaaccaagtggcattacataattgcttaatgcatacacggttttgtcaatacctatcttattaagaactgctgtgatattgcctgtgataaacccaccatattttaaaactgcaagaactccaaaattaataagcattgctatcacaagaattattctctttttatgcttaacagaattcttaagtttcttcttttgttccctgtcaatctctgctttgtgttccttcagatatacatctgacttatcctgtatgtattccattgctaacgccgcaagatatataacaagcgatgctgcaaccatgaaaagactattcttcacattgaatgaaaaataatacagataacttaacacaagtaaccacatccatcttactttagatggaagtacataatatataactactccgattaatataaaaaaccaaaataacgctgttgtaaatgacattttatttctccactactccatacaattccgcttcagtattgtacatttcctgaaatgaactgtagaaatatctattaatatctttagttccctgtttatgttctttaataactttgccaagaaattctgaatactcttttgcaaattctccattcatatgtccttctttatcaacaaagtccgaatcctctcttggcaatatgtcctgtctcgccatattgaaatcataatagaacactccattgtcagcaagcagtttgttaattgtatcatggacattctccatatgaagaatacccacactacttggagttattggagatgttaccgcaataagatcaatatcattatctctgcaatactttattattttcttaatatacttcaaaggataacctgtaatttgctctttacttcttacactccagctttttaaaagttcttcaccagcgagttctccattaacaggactaatgtagaaatatcctcttccggcatatgttccaccatctacatcaagtgaataaatatccgcttctttgtaaccttttgacaatttctgttcaatattatctttcatattagacggagtaaacgtacatgcctgtcttcttgtgaaaacattccttatctccatacgttccatgttatcgtatatatattgccactttacatatgaacgccaatccatctgacattgaataaactgttcagtataaaacccttctttaggcggattgaaataatactgataatcaatatctagaattactgtcttaatatcattagttctgcacgtatcttcaagcacataatatgaatcttttaccgtttctcctggaatcgccatatttattgaatatgttccggaatatttatcaataatatccggatctgatgatgcccttgcatgtgaagctccaattatgacagtatcataatcagttttattatttttcacacatacatttcttaaaatataattaacataacctgtctgtacacaggcaaaatcaatgactcccattatagcaataagtcctgccaggaatatcacacatcttaatattggtttaaactttttcataactaccttctatattgtttcttataaagaatatcaactgatgataatattactaattaatcaccttgtcaatcaactttttccatgtatctttcttaacctctcactgacaatatccgcagaacgcttatacgccagatgttcccttgcatatttctgaccattcccagcaattctttcgtagaaatccttatcctcataaagccttctcatatagtctgctgcctcatcaacatgtgcgtcagcccatacatttcccttcttgaacggctcatagtccttatcaagctctatcatgtcgtatccgaccatgcatgctgtatcactgttcataaactctgtattgcctgaccagtcagttgcaataacaggtgtaccaacatacattgactcagccataacaagtccgaagccttctgaacggtggagcgaaacatacacatcaacatcagcaagaagtgtattaacctcacatcttcccatatgaccgcacatataataaatgttattgcagtcctctattacagaaccaataatcttttcatcttctgcagataattctgcctcacttatcttaataacaagtccgacatccttgtatttttctttcatctgttcatctttgcagaatgcttctttaaatgctttaatagcggcaagcggattctttctttccataacgcttccactgttatacattacaaggaataagaacttatcttccggcagattaaaatgctttctatcaaacttcacaatatccgtctgcggtgcaacacagtgtgggactgttatcacaggcttgtctgtatatttcttcaaagtattcgtaacaaaatcagacggtgtccagacttcatcaacaagcttgaatgccggaagccactcttctggaaatgtctccagctcccatgcccagtatcctatgttatatctgtaatcccacacttcttttccaaggcttaaatatgctaccatgaattcacttgcattaacatgaataatattcacatcaaaaggaagctcctctgtgagtctgtcgtcatacgtatcattgcttcttgaacctcctggtggaacaaagaaatcccttataacatgaggttctttattctcatcaagcagcctgcacataattcttgcgctttgtccaagtccattatctcccttaatattacctattatattggcaccacatttgtatcttcctgcctcatatttttcaatagaatcagccgacagcttgtctgtggcattattaattatccctgctttcatcttacttaaaagcttcataggaataatctttgtcagcaccggtctcaatgcttctcccgtattaagaaaaaattttgataaacccatataaacctcaacattctatctgttattcatctggctgttaataaagtctctcaccataccaccaagtctttccggtgtatacttgtccaacgcatgtctgtatgcattctcatcaacaagtccagaattaatcttcttatctatattcttcattccattcacaagacttataaccttatcatcatcatcaccggcaagactgaatctttccacacagtcacctactacctcgtcaaatattttaagattacttgcaagtattggcttgttatgcttcattacctctaatataggcattccgaagccttctgccatagaaggaaacacaaagcatgagcagttgttatacaggtcatatcttgtagtgtgtgatacataaccaagataagtaagaccttcaacctctgtaagtgcagtctcaagaagctgctcaatatcatcctcctgcatcttaccggcaagaataagaggtcttgttccgccttcttccctgtatcttctgtacgctttaataaggatatcaacgcccttacgcttctccatattacctacatacaagaaataattctcatccttaggcggtacatatcttgtaagcggattagatataatgtaggcattgcagcttggaatcttcttagcctttggaaaatacatctctgtgtcgtccttagtctgctccgaattatacagaatcatatctgtatgtcttaaagtcacaccaagattaaacttaaaataatagctgtatatttttccaaagtatcttacatactgaataggaaacatatcgtgtattgtgataagtgtcttaaagcttccaccgagattaataggaataatcgaattaacctcccagaatatatccggcctcacctgctttaattctttcttaataaatgcaaaatatgcatacacacccgcacttctatatacaggctttccccattcaataaccttgattcctctagcctcaaatctcttaatatattcactctctttaacatctgtaaaaagaatccattcaaattcatcatatgttatgagctgttctaagaagtcattaagatacatgcccacaccgcttggtctgctgcctaaagttcttgcatcaacagcaatctttaatttcttcataactgtattctctgcccccaataaataatcttttattctatcagagtatttccataatatgcatgttcaaactacccctataacaaaacatgctttttttgattttaccatattatagatataattgctatatattattttctacacacaaataccccagcctctttggttattgtcataggtttcacaagctttttctctacatattttttaaaatctgtatacttatccacaaggtactctttctgattgccatgacatgatagtatataatctaccagcggttctgcttcatcaacaacaagcgcatctttataatctcttctttcaacatctgaaaaatgtttctttagaatcttatatccatcatcaagtccgaatttttcaaaaagcttatctgcttcaagtgcaattctcttatcgtatcccgacacaaggcggcttatctcctgcatatgcctgctgccatatgtactgcacacaagcacccctccaggctttaacaccctcacaatttcatcaagtgccttattgacatttttacaataaaacagcacatgattagcaatcaccagatcatacgattcatctttcgcccctgtcttttcgcatgaagccactctgaacctgaatgacacatcaatatctctttccttccagctctctgttgctttttttatatttcttctcgcatcacttatcatgccttctgatatatctgtaagctctatatatatgttttttttcttccctgaaaattcatttctctttcctgtcatggcaagctgacctatattgtcaacccacaatgttccatcaccacacccaatctcaagaattctcatccccttaacaataccacactgctcatatacccaaggaaaccatccctgtttattaactgaaaacctgttatgaagattaattcttgcagatatatttccagcattaatgtactgattcttcatgctgtcttccatattagtaagatggataatctccagcatattactccagtcaactccttttccctctttaatagagtcttctgtttcttcaatagctttacatacaagctgcatctgtgcaatcttgtcctgaatcattcgcttttgaagttcaagtgaattcttaagtacatgataatctgaatcaccaattgtcatatttcttatatcgtccagtgtaaatccaagatatttaagcaataatatctgctgtaaccttgtaaaatctgaatccgtataaaatctcactccctcatcagtaagaagtgaaggctttaatatattctgctggtcataatatcttatagtccttactgaaacatttgatttcttcgcaaattcgcctgaagaataatacccgtctttatgcatatattactccttgtaaaaatttttcaaaaaacacttgaaggtgacgttacgtcatcttttattatatacctgacttaaaaaatgtctacttggaaattaacataacattttaacaaacaaggaggaacttcaattatgaagggtattattttagctggtggttctggcacacgcctttacccactcacaatggtaactagtaaacagcttcttccaatctatgataagccaatgatttattatccactctcagttcttatgagtgctggtatcagagatattcttatcatctctacaccacaggatactcctagattcaaagagcttttaaaggacggaagccagttcggtgtcaaccttacttacgctgtacagccaagcccggacggacttgcacaggcatttattatcggtgaggaattcatcggtgatgacactgttgccatggttcttggtgataatatatttgcaggtcacggtcttaagaaaagacttaaggcagctgttgagaatgctgaatcaggaaagggtgcaacagtatttggctactatgttgatgatcctgaaagatttggtattgttgaatttaataatgaaggaaaggctgtctctattgaagaaaagccagcgcagcctaagagcaactactgtgtaacaggtctttacttctacgacaacaaggttgttgaatacgctaagaacttaaagccatctgcaagaggcgagcttgagattactgatcttaaccgtatctacttagagaagggtactttaaatgtagagctcctcggtcagggatttacatggcttgatacaggaacacatgaaagtcttgtagaagctactaactttgttaagactgttgagactcatcagcacagaaagattgcatgtcttgaagaaatcgcttacttaaacggctggattaacaaagatgacgtcctcaaggtatatgaagtattaaagaagaaccagtatggtcagtacttaaaggatgtcttagacggcaaatatgtcgacaagcttcatgaataattaagtacatttagttaaaacatttttcatataagaacacattttaaatattaaggagattaattatgacaattattgttaccggtggagccggatttatcggaagtaactttatatttcacatgttaaacaaatacccagactacagaatcatctgtcttgactgcctcacatatgcaggtaatctttcaactcttgagcctgttatgtctaaccctaacttcagattcgttaaggaaagcatcacagaccgcgaagctgtttacaagcttttcgaagaagagcatccagatatggttgtaaacttcgctgctgaatcacacgttgaccgttctatcgagaacccggaagttttccttacaactaatattcttggtacacaggttcttatggatgcctgcagaaagtacggtattaagagataccatcaggtatctactgatgaagtatacggcgatcttccacttgacagacctgaccttttcttcacagaagagacaccaatccatacatcaagcccatacagctcatcaaaggctggcgcagacttacttgttcttgcttaccacagaacttatggacttcctgttactatttcaagatgctctaataactatggaccataccacttcccagagaagcttatccctcttatgattgctaatgctcttaacgataagccacttccagtttatggtgaaggtcttaacgttcgtgactggctctatgttgaggatcactgcaaggctatcgaccttatcatccacaagggacgtgttggtgaagtatacaacgttggtggacacaacgagaagagaaatattgatatcgttaagcttatctgcaaggagcttggcaagcctgaatcacttatcgttcatgtaggtgacagaaagggacatgatatgcgttacgctatcgacccaactaagattcacaatgaattaggatggcttccagaaactaagtttgaagatggtatcaagaagacaattcagtggtatcttgataataaggaatggtgggagacaatcatttctggcgaatatcagaactactatgagaaaatgtatagcaaccgctaattaacacatttattctgtaaggagatttgacatgaagatattagttaccggcgttggcggtcagcttggccacgacgttatgaatgaactgataggcagaggtcatacaggcgttggcagcgacatcgcacctgaatattcaggagttgctgatggaagcgctgtcacaacagccgaatatgtacctatggatataactgatgctgcccaggtttctgaagttatcactaaggtttcacctgatgttgtaattcactgcgcagcatggacagccgttgacgctgctgaagatgatgataagaaagccaaggttaaggctatcaatgcagatggtactcagaatattgccaatgtctgcaaacagcttgactgcaagatggtatacatcagtactgattatgtatttgatggtcagggtgaaacaccttgggaaccagactgcaaggactacaagcctcttaatgtatatggagagactaagcttgccggagaacttgctgtttctaacactcttgacaaatactttatcgtgcgtattgcatgggtatttggtgttaatggaaagaactttattaagactatgcttaatgttggaaagactcatgacgaggttcgtgttgtcaacgaccagattggtacaccaacttacacattagatcttgcaagacttcttgttgatatggttgaaactgacaaatacggttattaccatgcaactaatgaaggtggatacatttcatggtatgactttactaaggaaatctatgcacaggcaggtctttctactaaggttacacctgtaactactgctgaatacggcatttctaaagctgcaagaccttttaacagccgtttagataagagcaagcttactgctaacggattcactccgcttccaacatggcaggatgctcttcacagattcttaaaggaaatcggtgagatttaatatttcaaaggagattttatcatgggacagattacaattgaaaagaatgtcgcaggtatcgaaggactttgtgtcatcacgcctgctgttcacggagataaccgtggatattttatggaaacatacagccagcgtgatatggaagaagctggtatcaatattaactttgttcaggataaccagtctatgagtactaagggtgttcttcgtggtcttcacttccagaagcatttcccacagacaaagcttgtaagagctatcaagggagccgtttttgatgtagctgttgaccttcgtacagactctgaaacttatggaaagtggtacggaatccttctcacagaagagaataagaagcagttccttatccctaaaggatttgcacatggattcctcgttcttactgatacagcagaattctgctacaagtgcgatgacttctatcatcctaacgacgagggtggtctcgcatggaatgacccggcaatcggtattgaatggccagagcttacaggtacttacaacggctcagcttcaggtgaaggctacgctttaagcgatggaacaaagcttaacttaagtgataaggaccagctttgggatacacttgagaacacatttaagtttgactaatttcgagatattatatttctagattttatcttgcttttagtgtatttgtcttactttcaaggtatttatctgattctggatatttttacccggttatgaatacttttatccggttttcaggggagattagccggtttttcgcactactatgccgaaagacctactaatctcctcttttttatttaattagtgcgctttttcatctctttttctgactcttcacatagcattcacctactaatctacatatttttcacttttttgtaggtattttcttctttattttcctgttctggctaagaatctgctgtcgaaaaacctactgataacacagcttggcataatttcgtaggctttctctcttccaacaactttcttcctgttttatttcacccactattcgtcagactttaccttgtttcgtaggcatcccctatcctagcaaaattttttcttatcatttcaccatttatatatatttttgatattgtgcttctcgtagttatattgtatagtattaatataattacataaggaggttgatatatgaaccatatagccaataacagaatattaaatgcaatgcttttatcacctgatttaactatcagtgctgtttccaatcgtcaatccgaacttattttgcttctcaacactatcaattcaagactaagtaatgcccctgacggaacactccgcattgctaagcgtggcaacgcccatcaatattatcacagaacagattctactgacagaacaggaacatacataaaaaagaaatctaatcttaatcttgcgaagagtctggctcagaaggaatatgatctgaaagtcaagcatgaaatccaacatgaacttcatgctattgaaacttttcttaagaactattctcctgaacagattgaacatttatacaattctcttaatgagataagacaggaacttattacaccagtctatacacctgccgaagatacattgaatctctggaataatgttcaatataattctcttgacattcctgatgatactcctgacttctactctgataacggagaacaggtgcgttctaaatccgaattaataatcgccaacaaactaaaacagcacaatattccatataagtatgaatatccgcttgtgctttctaccggggtaaccgtccatcctgattttacctgcctcaatattaatacccgtcaggaattcatatgggaacacttcggcattatgggagattctgattatatgaacaaaacattaaagaagattaacgattacgctaaatccggttatgtattaggcaggaactttattgccaccttcgaatcttcttctattcctctcaattccaataccgttgatattaatattaatgaatatcttttatagtcaatgaagctttaatggtgcaattctttcacacaacacctactcaattaaccaaagttgttaattgagtagatgtttttcgctccccaaaaaatcaactagcaacttgaaaagcacactaatcttagtaatatatgctatatagtaggtctttttcccaccatctcatctcccagctaataaattccaacgattttctataaaaaagacctaccaacatccttataaaaagcatgttagtaggtcttctccaatatctaattcaaatctcaccagaaatatgcctactcaactcttgaaaacaacataattagtaggtcttctctattaatgttcattcggatgataagtatcaaccaccttcttcagtgattctcttatattaccagtttctgaataagcttcttccttaagcttctcaaggttatcaaagaaattctctttatcaaactcaattggttttccaatgtggataagcttgttatctgtctcctgaagaccttcttctttcataagaagctcttcgtagagcttttcgccaggacggagtcctgtgtatttaatttccatgttgacgccaagtgtgtaacctgacagtctgataaggttctttgcgaggtcatcaatcttaacaggctcgcccatatcaagaatgaatatctctccacctttggcatatgcacctgcctgaagaacaagtgaaaccgcctctggtatagtcatgaaatatcttataatattaggatctgtaaccgtaaccggtccaccagcctcaatctgtctcttaaaaagaggaatgactgagccgttacttccaagtacattaccgaatcttacagcaacgaaatctgtcttggatatctcgttatacgtctgaacaatcatctcacagatacgctttgttgctcccattacattagttggattaacagccttatctgtacttatcataacaaacttcttaaccccatacttatcagccatccttgcaacattccatgtaccgacaacattattcttaacagcctcatcaggactgacttccataagcggtacatgcttatgtgctgctgcatgatatacaatatctggcttatactgtgcaaatacgctttcaagtcttgaaacatttcttatcgaaccaataagagtaacaacattggcatcaggataattaatctttaattcctgctgaatatcataggcattattctcatatatatcaaatataatgagctgcttaggcttgtgacttacaagctggcggcacagctctgaaccaatagaaccgccaccacctgttaccataatgaccttatccttaacataacccatgatagattcaatatctacttcaatcgggtctcttccaagaaggtcaagcacatcaacattacggatagagttaacattaatctctccatctaccatctgatatacacctggcagaatcttaagagtacaatcagtctctttacaaatgtttaatatatcccttttaacttcattagatgctgatggaattgcaaatataatctcatcaatatcataaagctttgctgcttccttaatcttgtcccttgttcctataaccttgacgcctcgtatgtatttaccaaccttgcggcggtcatcatcaataatacatgcaatattagagttggcaagatagctcgaattctgtatttctctcataatgacattagttgcctctccggcaccaataatcattacattgttggaagtcttaatatttctgtatttgttaagaacagttcttatcattctgtacataaaacgacttgcacatattgcaataataaggtatattgccgcattaaaataacagcttctaggaagcatattacccgcaatcttattacttaagaaatgcactacttctacaataatacacgcttcagcaattctgtacacctcagctatactcgcatactgccacagactgtgataaagtctgaacagccagaatataagcagagacattatcgtgtacggaagcatgttctctacataattactaatatactgaggttctatagatacaatacctacatcaaatctcataataagcgacagatatacgcatgcattcagtaaaaatgtatctgttaaaaacaagaaaaatcttcttaccagaagctgtattctatcctttttagtctcacccatcatctgttcctcgtttctttagcaggctttttagcagctaacccacatactgtaccaattccataagaaatatgcaacaggaaaaataaaaatggcagtgcaaaacatgttttattgcgttccttcttagctcctattactgcaactaccgacataaccaccgccaacagccagtatgatccccacataagtcctgtaagtccgtatacaatacgagaaaaaaacgacttcacagcaagcagcttacatgacacacttgcaactgttgtaacaataatagccatgacaaaagcccacggaacaaaatgatatatagaaaggcatcctggacataccttgcttgtctttccaatccagtatccattgccatatttctgcttaagcatcttaggaagtgaacttcttgtatgctggtatgatattatatccggacagaatcttaatttaaaccctgcttttctcatacggtaatgaatttcattatcctcagttcttgcaagagactcattataatgtccgatttcttcaaaaacttcccttctatatgcagcatggaacagcgatttcatatatatcttttcttccgttccattcccgccattacggtaaggtgctatgcttgaaccaaacatagaactctcggcaagaagaagtgtatccttccatggtgtctcttcatcaactatattaggtcggacaccaccgacaaccatctcgccttcttctaaaactttaacattcttgctgacaaaatccaccgggatatgtgcatgcgcatcaactcttataacagcttcccctgtataattatcgagcagcacattccatccacacggaagtgtcttcttaggattatcaagcacaactatctgtcttgctcccatcttattctcatcagcaaacttctgcataaccgccttcgttccatcagttgatgcagaatcaacaagcacaacttccataagattatgatcataatcctgcctgcttatgtcatcaagaatattctttatcgtattctcctcattatatgcaataacggcaattgtaataaacatactctacctacttcttaacagtcattctttcacttccaactactgatgtaaatgtatcccacaatacagccgcatcagccttcacgccaaaatgtttcatactttcaaggttataacgcatttttgccggtaatacttcattcagatatatattatctgtacttttttcatcaacagcctcaccaagaagcttgtcctcatccttataagcaatacttgtccttgatgtaagtcctgccggcaaaagaagtgtcgcatacatctccttagtatacttcttaacatacttaggaacttccggtcttgttccgacaagagtcatatcccctgcaagtatattaaaaagctgaggaaactcgtccattctgtactttcgtaaaaatgcaccaaccttagtaattcttgaatcattatctacagtcactgctgcccctagcttacttgcattgtcaaccatagtcctgaacttgtatatacgaaaaattcttccatactgtgttactctcgcctgcctgaaaaaaacaggtcccggtgaatcaagtctgattgcaagtgcaattattcccattggaataattaaaactgccagcataataccagcaacaataacatcaagcactcttttcatctctaaccacattctgtgtttcataagtatattatagtattttcttacttccttagttctcatttcatcaggaagaagctgccatggtcttaactccatcgtaatcaatcccctttttgttgttgtataactaatgtccgattatttcattctgttaaactgctctattacatattctacctgttcatcagtaagacatgtatgaagcggcagtgtaatctcattacgatacatattatatgaatgtggaaaatccttaatatcaaatcccatgttcttatatgccgtatgcattggaagcggcttaaaatgtacattagttgcaacacctgcctcagcaagtcttgtaatcagttcattacgctccttaacatcctttccaagaagccttacaagatacagatgaccacttgaagtatattcatctgtaaaatgcttcataatatccacatcatcggctgcaatcccttgtgtatatctctcaattatatctcttcttctcttaagaagtcccggatatctcttaagctgtacaagcccaatagaagccataatatcagtcatattgcatttgtaataagttcccttgatatcatattcccatgcaccaagcttagtctttgcaagtgcatccttagactgtccgtgaagtgagtaaagcattatctgcttatagatatcctcatcatcaactcccggaatacttctccatgtaagagctccgccttctgctgttgtaaggttcttgactgcatgaaatgaaaagcttgtaaagtcagccttcattccactcataacaccaccctcacttgctccgaaaccatgtgcagaatcagcaacaattgcaactctgccaagtgcctcctgaagcggtgttgaagccttaaatatattctttttactctcgacaatctttcttatcctgtcatagtcaaccataacaccacctatatctacaggtattacagccttggtactctcattaattgcagcttcaagcgcttcataatcaaggtgatatgtgtccttttcaacatcaataagaacaagctttgcattaacatgcgcaacgacacttgcagatgctgtataagtgtatgcaggaacaataacctcatcgccctcaccgattcctaacagacggagtgctgtctctaaacatgctgtagctgaattgagacatgccgccctgttacagcctacaaactgagcaatatttctttcaaactctttagttcttggacctgttgtaatccatcctgaccttaaagcctcagaaactgcctgaatctcttcctcggttatatctggtggtgaaaatgaaacattcataactcttatctccttttcgtactctactttgtagatgactttgttgttgcaggagtgactgttggaacctgtacctgtgttgtagtctcctgagtacctccacttatcatttctggaaatgcatatgtcagatctcctgctgtattagcaattgatattgtataactaactgtattatatccattctgcgaaagtgtaatcgtcttctttccagatgatttgttaaatgaacacggaacagttcctatgtattcactattgacataaagaaccgctcccttaggtgctgttactgataccttatatccacttgtattatctgccgctgtacttgttgatgtacctgatgaagtcatgtcgataaccttcgtaacataggctgaattaacatttataatctcagaatattcctgatagtggttggctaccagcttaactctgtgagttccataagaaagtgaaactggggaagaataatcaacctcaacaccatcaatgctcataaccgcacccttcggagtaactgaaaaattaacagcccccatcttaaccggatcactttgtacttcagaaaaatcaactgatgtagtctcatctttagctatagtcactgtcttacttgctgacaggctgccattacgtacattgaccgtatatgttccaacaggtgcagtcaccagcatatcctttgtaatacccagtaattgtttattacctatgcttacataaccaccaacaagtgcatctacgcctgtaagtttaagatatccgtgtcctgcagttacattcaccgaatatactttctctccaacgcccctgataaccagcttatcctggtcaacgagctgtgcaatacttatacgttcttctcctgaaagcacaactgtgtaactttcatatatcatattggaagccccaatgcttaacttccttgaattctcatctacggttattcctgaaacatcatatcttacccaggcatcactgtttccgtgtatcttcaccgccttgcccttcttatccacatatacatcatatattccacccatatccatggtagaagctgcttttatctttccgtaagcatcctgaatatctgtactgcctgtataagggacttcatattctgttcctgtctttatatctacaaaccgcattctgcccgtgtcagcatctctcaatgtaagaactcctgtaagtgtaggattctctccatcacccttaatctcctttgcggcacctggtgcgggggtaatactgcttcctggtatcaccgccctgtcattatttctggaaaatgtgcatgctgtctgacttacaattaacaccataagcatacacactgcaattattcttttcataagcattcctcgcaaatacttttacccttatatcatcagattttatcacataccacacattttatcaattaattctcttctgcgcatattctgttcaataacaatctttaatttatctatattcttagcaggaacccacgcctttcctgcgttatagtactgatttataatcttccagaatttttctggaaagctcaataatgtcacaagcatgtcaatatcatcatcttcaagcggctttaatctgtcgtattcatcaaccagtctgtatgccacattaatattccagtcatgcttttccataacctttcttaaaaactggtaaagatctgcaacctgacagtcattatgacatttttcaaaattagtcactgcattgccgccattaccaacatcaagaaacacattatgataattatagcttccatgcacaagctcattagtctgttccatcctgtcaaagcgctcatcaaaacgttttgaattaatattcctgctcgcttcatccgcttccctgaaaaatgtatcaaccgcaccaagcgcaatctgttcaaattcatttttctttttcttgccacgcatataattagctgcctttttaatttcttttgtatgtctttccatattggtgcgtaaccctgctcccctgtcaaaatgtacagcattatgtacgatgctttcactggcctttaattctgactcgggctgctcatctgcggtctctgcaagcgccatacattcccattgctttgtaatatttgtatttacattattccttaaatatcttacaccattagacgaaacaacatttagacaaatatgaagtcttgccagagtccttaccgcctccatcacgtcattcacagacttgacatcacattccctgcctccaaaccagttcttcattacatatctgtgcccatcatctccaacagtaaaaagttctccatcctgatttctcacatatgtatccacattttcaaagcctgcatcactaactgcttttgtcactgcctcatctctcagataaaacccatcatttcttgaacactcgagaaaaagtctgcatcctctgtctgtaaaaagaattactcctccacgaccttttaccattttattaacctgaatatcataaaatctaatacattccaatgatttatcgttcatataatcccccatttccgcacttaatacagacgccctttgctcatacgtctgcgtctgccttatcttatgacatttatggctgctatattccttggatttaatgatacgacgaattaagaaaatcataatcttgatgaaaatgtaattttttcttataatagatagatgtgagcttttttcacatttataataaatattattatagggggaaatcatgcctgaaaactttcatattgacatgccggaagctgtcaggaacattatacatacaattgaagaacacggcttcaaagcatatgccgttggcggatgcataagagacagtatccttggacgaaacccagatgactgggatataaccacttctgctgttccatcacagataaaaactttctttaaaagaactgttgatactggaatcgcccacggaaccgtcactataatgatagataaaaccggatacgaagttacaacctacagaattgatggcgaatacgaggatggcaggcatccgaagtctgtagaattttcagacaggcttgttgatgacctgtgccgccgtgattttacgataaatgccatggcatacaacgacactgatggatttgttgatgaatttaagggtcttgatgatttggatacaaaaataatacgctgcgttggtgaaccagaattaagatttacagaggacgctctgcgaatgatgcgtgccataagattttctgcacagcttggctttaccattgatgaagcaacatggaatgcaattaaaaagctttccccttcaatcagcaaaataagcatggagcgtgtgcatgtagagcttggcaaaacgcttatgtctgcacatcccgattatgttgcgcaatattcagaagcaggactttttgccccaatactcccggtaattgacaatgctctaaagagccgctacaagcgcaaaatacttgcaacattacaacacacacctgataatatatacttacgctacgctgcacttttcataacttctacacctgatgaagcagctaagactctccgtgcacttaagctggataacaagacagttaacacagtatcaaagcttgttgaattatcaaagatggatatagaagaaactgaaccggctgttcgtactgcccttaataagtatggcagagatttcctgcctctgtggcatgagcttatgatggctgtaatccaggcatctgaagacatcacaggaataagtaatccggcgaaggtaaagcatcttctcacattaaagcgtcttggaacagatattcttgcacgcggtgactgctttacaataaaagacctcgacatatcaggcaatgaccttattgaatatggccttcagggacacgaaatcggtgaaacactgaaatccctgcttgatatcgttatagagaaccctaagctcaatgataaagctactcttattgcaatgattgaacatatcaaataatataatcataaaataaccctcaccggctgccttctattctggatacatatcaattacatcggctttggtgagggattcttttaattaattgcgagtttatttttaattatatcaatgttgtaatcaggtgcagccgcaatcactacatcatatatcggcttgatatctgccacttcttcctcaagttctgaggctattgtctccagagtttttgatttctttaccttttttataatctgattaatcatcatagattgttcgccctccgcaaatgctttttcagaagcctccttagcagctttctctactatttcctgcgccattccctgtgcaacttcctgcgcatactcctcagccaacactcttctgacttcttcctcatcataatcatatatactcacttcgacgacctcctccctgtgctgttcgaagaaatcgacaagtatatcctcatctatgcattcgttcattgcctctgttactgcaattctgacattgtcaccttcaacacccatcttgaacctcaccttattaacaaatgtcatgtaatcacgcagcgttttgcacttattaaggatatgtacatcttcgttaatgttgataacacgcactttaagctccagctccggattgtctgtcggaatctcgtacatatctgacagcctgatttcatcctcatcttcaacccatttttccagaccattgtagaatgtcacaaaacgcggaacaggaatcttaatcatacttctcctgtgaagcatggaattactgaacagctccctgaatacatcagacacatagtgcaaaaatcttaacggcatattaggattcttactcgactgctgctcaaacatatacaggctcatacatagtaaaaatgaagcatcattcttatacttcatatatgaaccgccgtttaatgtagtcacctgcaaatcatccacattcgtgtaagctgaattgttaagtgcattatacagttctaaaagattcttcttatccctgtacagcatacagaatacattgtccttaaatttagatgttacattgtctttcttctctgccatagacatcctccccgtctcttttgcaggcagatatccacgcacatatactaatattgtctatataaatatattagcatctacagatatctaaaacaagcctgcattattcaattatgtgttaatgggttattgctgaatgactatccagctttgataagcaactgcctgattagataaaatcatgtcaattgcgtcagatataagaaatatttcttttaatatattgttatcatatttttaattatatatcaatatatattttatcaagaatatgtataaatgtaaaatcccctccagattataaaaaagccccctccggcaatactgccgaaagggactccattctcaaaaatcctataaataattatgattaatatgccttaccccagtaaaccatagccttagccggcttaccacagcatacgcacacatcacttaacttctcctgtgcaaatggcatacatcttgatgtacatgtagtatcttccttaatcttgtcctcacaagcctggtctccacaccacatagccttgatgaatccagccttattagctgctgtatccttgaattcatcataattaagagctgtatatgtatgagcttctctgtgagctcttgctctctcaagcatatccttctggatagtatcaagaatttctggaattctgtctgcaagctcatcgatagatacagtaatcttctctcttgtatcacgacgaacaataacagcctgattagcctcgatatctcttggtcccatctcaactcttacagggataccacgcatctcctgctcagagaacttccagccaggattcttatctgaatcatcaaccttaacacgaagccctgctgccttaagagcctgtccaacttcataagccttgtcaagaacgcctgccttcttctgcataataggaataacatcaacctgaacaggtgctaccttaggtggaagcacaagtcctgaatcatcaccgtgagtcataataacagcaccaataagtcttgttgttgttccccatgaagtctggtgaacatattttaacttattatccttgtctgtgtactggataccaaatgctttggcaaatccatcaccaaagttgtggcttgtacctgactggagagccttaccatcatgcataagggcctctatagtataagtagcctctgctcctgcgaacttctccttatcagtcttacgtcccttaattacaggaattgcaagaacttcctcacagaagtcagcgtaaaggttaagcatctgctgtgtacgtgcctcagcctcttctgctgtagcatgtgctgtatgaccttcctgccataagaactctcttgaacgaaggaaaggtcttgtctccttctcccatcttacaactgaacaccactggttatatacctttggtaaatctctgtatgactgtatctcatctttatagaaatcacagaaaagtgtctctgatgtaggtcttacgcacattctttcctgaagtggattaagtccgccataagttacccatgcaacttctggtgcaaatccttctacatgatccttctcaacctcaagaaggctctctggaatgaacattggaagataaacattctcaacacctgtttccttgaatcttctgtccatctcattcttaatattctcccagattgcatatccagccggcttaaaaatcatgcatcccttgacgcttgagtaagacataagctctgccttcttacacacatctgtgtaccactgagcgaaatcctctttcatggatgtaatcgcttctactaatttcttatcttctgccataataaacctctttctatgacattacagacccgtttcatacggagcctgatgcgaatgctgcttcgcattgtccgcctgccattgacggcaccactagagtttatcatgttctaaaatgcttttcaagtaaagaacaagtgcttttattatacaatatgatattggtccaagaataaatccgacaaccccatacacaagtatcccgatatatataaccgcaagcattgtaaatggcgcaattcccattctgtcacccatacattttgactccataatctccctcacaaaatatgtgacaatatacaacaccacaagaatcaccgcatttttcacatgtccgaaaagcaggcttcccacagcccatggtatcagtaccgttcccgtaccaaatatcggaagtgcgtcaataatcccagtcagcacaccaagaagaatcgcatatggattgcctatcattaaaaatgctgttgaacacaccacaatatttatcgacattataataagctgcaccctgaaatatacatttatcaaattgcgaagccccacatgcaccgccccgacttcgtccttaaatatagtgttctcccgccagcttctgtacttctcaattccagccgccgcatatatcgttccaataaagcacaccacaagtccggcaaccgccataacgcaccatgttataaccggaacagaatgttttctcataattgtaaagaacatctgctgtccgtctccatctataattatccctttacatttttcaaaaaatgcgtaactgcagccttctttcaacttaatccagccatcaatacggcagcatacaagcttaaactgcccatcaaggctgttaatattctcatcaaaattggctatgaaatctttaagttcgcgaaacgccatataaccgacatacaacagcactgaaagaataataagcgttaccattgttacaactatactcgcagcaagcgtctttttctcccttaaaagtttcgccagccccactatcggcttctgaagcagcaccgcaaaacaaaatgcaatcaagaaaggccacacataatagaaaagtactttaaatataaaaaaaaccaccgcaataataacggcactcgccaaaagaagcgtcagccgcttcctgaaatcccacacattttcacccatatg

SEQ ID NO: 1128 - DNA, 11278 bp, unidentified
  source 1..11278: mol_type = unassigned DNA
tcatactatctcacctgccgtttcccgatagatttcaaagaacttatcctcaagtggcatttccgccgtcacatgggaaagcgtgtcacacaaaaccatttttccgttgatgataatgccgacacggtcgcagatcttttcgatcagtgaaaaaatatgtgttgatacaatgatcgtttttccttctgctttcaattcctgcagaaaatcggtcacaactttcgccgtgataacatcaagtccgtttgtcggctcatcaaaaataatgatctgcggatcatgcaccagtgaaatgatcagggatactttctgtttcataccggtggagagatttgcaaccttcacttccgcaaactcatccacaccaaatttctgaaacaggatacgttttctctcatcccgctctgcctgatcgacaccgtataattctgagaaaaaatcaaacagatagttcggagtaaaaaattcttccagttttaattcactcgtcagaaatccgatctttttccgaacaccgttcggatctgtcacaatactgcttccgtcaatcagagcatcacctttatccggtttgatcagcgttgctaacatgcgaagcgttgttgtctttcccgctccattgggccctaataatccaaaaacttcccccctgtaagtacaaaaggaaagatcatccaccgcaaccttaactttttccgttgtcttttctaatttctgctgtttttttgacaagtgaaatgtcttggataatccactgactgtcaataactcttccataaccctctccattaaaaatttctatatcatgatcgtgatctacactcgcttcgctcggcagtcttattatatcgttccgtcatccatactgtcttcaatatcatcatagatatcatcgtaaatatgatcatagatgtcattatagctgctataagatccaagtcctgtaaaaaaaatcaggatatacagaataatcgatgctgcaaaaccgattccacctgtgatcaaaccaacgatcgccattccttttttgtttccttttaccagctgtaaaataccgaaaatgattgcaaggataccggtgatccagctgatacaagtgcagaacagcaaaacggtgatgattccaagtatcaacgacgcaataccaaatccttcactttctgacttgttattgccatttggctgtccataattataatctgtactgccgtttgactgtccatagttataacctgcactgtcatttgactgtccgtaattataatttgtattgccgtttccatatgacgtatttgtataatacggattgtctgtcatagtcttttctggatttacacgctcttcatttccggtcacagtcttctctaaatttacacctgctgtaccatcagtcgtacttttctccaggctgacaggatttccctgatttacattcggctcatcatttccataattccagttattttcttcactcatactctcactacctcttaattaaatccgaccactttctgtgacagtcgatatgccgcaaccgaaatctttctgcctcccttgcccggcagattcattgcatttcccataattccggcgcgcagatgatggaataaacggatgtcttgatccttaatatatttccacagttcacgttttttcagaagattttcctcagtgccggagcggatcagcataatcgtggaaatgaccgtgatgatttccagataattaaacatgtaatgacgcagttttcggtttggaatcttccagagatcaaattcatctaccataatcttatttacattgatctgctggtcgatacggctgatcatcactttctcattgaccgactgatcttccctgccaataaagtaacggtaaaaatctacatccatataatacagtgtttttacacttggtaatggtttgtacacataaatattatccacataaaatgtatgtttcggcaactctaatccacattcacgcagcagttttgtacgataaatcacagaatgcatcaaaatgtactgaccctttctgaaacgtgacacatcattccaggtaaaaatctgattttggggcaggttcgtgtagtgcatcacttttttatgatgcgcaccttctttttcatatacataattggcaataaacatatccagggtctgattgccgccggtcagctcacgaagtttatctaaaatcttcttataagcctcctcatctacccagtcatcgctgtctaccactttaaaataaagtcctgtcgcattgcggattccagcattgacagcctctccgtgtcctccatttacctgatggattgcacggatgattcccggatatttcttctcataggcatctgctatgtcaccggtgctatcttttgacccatcatcaatgatcaggatctcaacatcatcgccacccggcagcagggatttgatacagttttccatgtaatcctgtgaattgtaacacgggatcgcaaatgtcagtaatttcatatatgaatcctccgattatctttttgtattttctgccatgatcgcatcagcaagttccatcgcttttttcgtcatcgcatcgatattatagtatttgtattctgccagtcgtccgagcagataaaaatgcggcagtccacctgcaagcgcacgatatttttcatagagttcctggttctttggctctaatatcgcatagtaaggaatttctccctccgctcctgtgtaggcaaacggatactctttcacgattgtggttccgtccgtgttcttttgtccggtcagatacttaaactctgtgattcttgtaaaatcctcactgaccgtgtaattgaccacgctgtgtccctgataagattctttctcataatgttcaaagtcaaatcttaaggaacgatatggaagccttccaaactgacagtcaaacaactcatccagtgcgcccgtatagataacctctccgtcaaacggtgttccatcaaaataaatctgattttcttcaaaacgcaatctctctttacagtcaacacctgtctcaaccgtgatgttctcatggtctaacatgcgctcaaacatcggtgtgaaaccttccttcggcactccctgatatttgtcctgaaaatagcggttgtcataagaaaccagcaccggcacacggcctgtcacttccgggctgatatcctccggtttttgtccccactgcttcatggtatattttaaaaatacattttcgtacacaaactgtgcgatctcgcggatgtccggatcttcattttcccgcagtttcatgatcggcacgcggcttccctctccgtatgcagcaatcagtttctgctctaatgcatctgctttttccttttcatataccatatgaagcgtatttaaattaaacggaaccgggatcagacgatccccgacctttgctaccacctcatgtccgaatacataccagtccgtaaatcttgagagatactgatatacttcttctattcctgtatgaaaaatatgtggtccataattatgtattaatattccatgttcatccggctcatcatagcagttacctccgatatgactgcgtctctctaaaaccagtactttctttcctgcttcctctgcaagctttctcgcactgacagcacccgcaattcctgcgccgatcacgatacaatcgtacatgtaatcctccttgttttccactttgttttaccatagccattctattatacacattttcctaccgcaaaccaatcaaatttttctttagatattcttaatttctgccaaagtatgtagttgttcatattttatttacataattctcacaaacagggcatacggcggtcacaattccccgatatactaaattcaaagttaaggcaacaagttaaaatttttcatagaactttttttcatacctgatgtaagtcaggtagccttgcttatccgataagcaaggttcctcccagcaaatagtgaattacttcacttttcatacacactctttttcataatgaatagccggtgctgttgcaccggctccctctttttataaatattttcttttaagctttcttttcatttccaagaagaatgttcatatatttcgcatacgcagcaaaagcggacggaatagcatatttttcttttgcatcttctgcttccacaaataataatccatctgcacgatttttttcacactgcacctgtggatgcatttccggctcctctacacggactgcataacctgtcatgtgccattcgatatgggaaaaaatatgtttcgcctcacctaacggctgaatacggatcggtgcataccccatctcttttaccatggaaagtacttcctcctgtcccatatttccttccacattcggaagctcatacagtcctgccaaaagtccctttgccggtcttttccggattgcaaccttctcatcatcccttaaaatcagaaccgtttttttctcgatctttcgcggttttgccttgctcttgactggtatctgtccgatcagttcctgtttttttgcctcacaaaaatccttccatggacattcggtacaaagcggtgcaccgtttggcacacagatcgttgctccaagttccatgagtgcctggttaaacgcaccggcaagattctgatgatatacctttgccctcagatcatctgcatcctccatccatggaaatacatttttttcatttctgccgtctgccccatgcatcaatttttctaataatttttccatctcattacggaatgactgtttcatgatatccgtatcatccgcagaaacgcgcgttaaaacacggagcacatttccatcgaccgccggaaccgggattccgtatgcgatagatgcgaccgctcccgctgtataatggccgatcccctttagtttcaacagtttctcataatctgccggaagttgtccaccataatattccacaacttccacagccgctttttgcatgttcctgacacggttataataacctaacccctcccaaagctttaaaagttcatcctccggacacactgcaagtgcctttgcatccggcagtgccgtggtaaaccgctcaaaatacggctttaccgcctccactctcgtctgctggagcatgatctccgaaacccacacccggtatggagtcggttcctctcgccatggcaatacacgggcatgatttaaaaaccattgcaataatggggatacaagttgctttaagtcgtaatcttttaacatgtatgtctcaaactttctttgttatatagcagccttcatgtctgcgcttatttttttcaaaccagtaccttatttgaggtcaaactggctgacaaatactgcgatcttctctaaacatttcttaataatgtctttggaataagcataagagcagcggatgtaaccctctgcacaacttccaaatgcgtctcccggaatgactgccaccttctgttcctgcagcagacggttacaaaattccatgctggtaagtcctgtttttttgatcgacgggaatacataaaatgcaccttccggttctgtcacatccagtcccatattccggaacccgtccaccatgatctttcgtctctcatcgtattctttacgcatcacatcgatctcttcgtcacgaaccggactcgtcagtgcttcaagcgccgccacctgtgacgttgttcctgcagacatggtcgtaaactgatgaatcttattcatatgaaaaataacttccgcaggacccgctgcaatacccatacgccatccggtcattgcaaatgcttttgaaaaaccatttaataccacacaacgctcatacatatccggcagcgccgcaatagatgcatgctttttgccataggtcagctctgcataaatctcatctgtaatcacaaaaatatcatgtgcggtcacaacctcacggattgcttctaaatcctctttttccatgatcgctccggtagggttgttggggaatgagatcagcagtacttttgttttatctgtaattttttcttcaagttcttccttcgtcaggcggaatttattttctgcctttaacgggatggaaaccggaatgccgccacacaattccacacacggaatataggaaacatagcaaggttctacaactaacacctcatcccccggatccaccagtgcgcggagtgcaagatcaattccctcactcgcccccattgtgatcagaatttcattttccctgtcataatgaagtccaaacttttccagatactctgcagatgccgcacggagttcgaccgtaccgcgattatcggtatactttgtctcacctcttttgattgaagcaatcgctgcctccctgacatgttccggtgtcggaaaatccggctcgccgacaccaagtgacaatgctccctccatcgtatttgcaatatcaaaaaagtccttgatccctgaatccggcatctcctttactaccttagataagtatgatttgcttgtgtccatggtttttcctcttttctgtgtctttgtcaaaatatcataccacctatcatagcactttttctaccaaatttatagtgaatttttcccataatctattgacaaattcagggaaaagctgtacgctattaataacgtatattgttaattttttatcaaactattcaggagggttccaaacgatgagcgattttaacaatttaaaactggaagttgctgaggagattgctgttcttacaatttcaagaccagcagcattaaacgcattaaacagcgagacattagacgagttaaacacagcattaactgagatcgaagcaagagacgacatcaaagtcgtaatcttaaccggcggtcctgacaagaaaggcaacgaattcaaatctttcgtagcaggcgctgatatttctgagatggtaaactttaccgcagcagaagcaagagctttcggtatgagagcttccgtaccattcttcaaattaatgaacatgcgtcaggtaacgatcgcagctgttaatggttttgcacttggcggtggatgtgaaatttccatggcatgtgatatccgtatcgcatctgacaacgctactttcgcacagccagagacaggtcttggaatcattcctggattcggcggtacacaaagacttgcccgtttagtaggcatgggacgcgcaaaagagatgatctttacctgcgattccgttgatgcagcagaagcttaccgcatcggtcttgtaaataaagtagttgctccggaagagttaatgaacacagcaaaagctatggctaagaaaatcatctccaaaggaagctacgctgtttccgttgcaaaagcagcaatcaacaacggttatgatatggacatcaagaacgctgttgagatggaagcaaacttattcggcgtaacctgctctactcatgacaaaacagaaggtatgactgctttcttagagagaagagctgctgatttaacagatttctaaaaaaacatatcaaaaaaacgggctgataattcagtccgttttttttgatatactcatattccaaatttaatgtgcaggtaatctctgattacctctacgcatttttcacgcccccatcaaaaccgacaccaccggcatcgtcaccgcagcaagaattgccgtaagcgcaactcctcttgccgccagatcataatttccatcatattgctgtcatactgccgacaggcgttgcgagcatgaccatacacacgcctaaaatcatcggatcatcaacaaactgctttatgatccatgtgcctgcaatcaaaaaaaacgtcagaaccctcttagttccaacgcctttgtcaataatttttatcatttgtatgtaatatagtcgatagctatatttttgtcaatatcccgctgtttctatatttcagtggagaaatgccatatgtttttttgaaacttctgataaaatagcttacattctggtatccgctctgcatagctgtctccgtcactgaaagatcggtgtcctgtaacaactgttttgcattctccaaacgtaaatatgttatatattgcgacaatgtaatatggaaatgttccttaaaataccgcgatatatatttttccgaaagatgaaactgttccccaaattcctttagcgatatctttcctgtaaaattctgctgtatatatgaaaccatctctttttctacaatatttctgccgcttgtatcattttctattacaaatcctttcttccacatttcaagaataaattgtaaaagaattatttttgtctttatctgcgcagttatttttgactcagtttcatcattttctgccatatatatatcaatcagctgctcacacagttcttttgccgagtcttttactcttgggtttatcatcaaatgaccgctatttaatggttcaagcaatttatcatctaacatgtcatcggtccgaaaagatatatattttaacggaaacaaaaatgtaaaataatccacagtgccggtctgtgagcccataagatgcagattgcccggcgatacaacgaacgcatcccctgcttttccaatataactctctcctgatatacttaccgtcagcaaaccactttttacatatataatctcaaattcatcatgccaatgtaccggtatctgaaatgaccgccccgcattctctatgtgatatatactaaatggattgtcctttgtaccatgtggtttattttcctttaattcaaagtacatactctctcctacaattctacaaggctcttgcttttccattttccgctcttccatctaagcaccattccaacagctctcgcgcactcatcacctgccatggcaatatatgctcctactgcctgaagtcccatatgtattccaagaaaatatgttccaccaactgcaaacagatacataaatatcgcacccattataaccggaaaaaccgcatctccactggtttttaatgcctgaccatatacaagatttgtcacccttccaaattcaaggaatatatctactattaacagccttaccacaagatttatcatttgcgcatcatccgtaaatatatgaactataaaatgtccggacatcgcaaatgtcacagagaagcacgtcgctgttataagaccatataccacagctttccgcgtacccctgtcacattcttcaaactcctttgatccaattctccagccagtcataatagcattagcctgtgcaagtgcagctcctatacaatacgaaaaatttgctatctgcatagcatatgaacgggctgtaacattcattccgactgcatccatctgattcatgaatcttactataagtgtcattgcaacattataaagtgctgtttcaaatgcagaaggaaaacctatcttaacaatctgcgcaagtatcttccgtggcggaatgcgctccggactctgctttgcctttatcagtacagcacccatgcctgctacaatgataaggttcacaacttttgaaataactgtggcaatagcaacgcccattactccccaatgaaatacaaacaggaacactgaattaaatattatattaatggcatttcctgcaatcgttcctatcaaggaatgctttgtatatccaaacactctgagatagctggaaaaaatgggaataagcgcatttaaaacacatgcacctccaacaattttaaggtatgtttctgccggctcaagcaaagccggagaaatacttacgattctaagtatttctccagaaaaaaaggcaataataaccgacataaggatacctgtcagtgcgttaaacataagtccaagctgtctggcctgatatgcaattccaggtctccccgctccgatattttgtgacataactgctaccataccggatgatattaccccgaacatgatgataaaaacacttatatacgtatttgctgttccgacagctcccacagcctggtcgcttacagacgataacataagtgtatcgaccatgcctgaaagcatataaaataaagtctctaagcatattggcacagccagctgtgtcaatgtttttctttcagttgccatgtttttctcctatgaaaactaatataacatacattatcaataatatggtatttttctgcatatttcttgtataatattatgcaaaaattgcattatttctacttatttacgaaatgaatcagcaagtctgttaattttgccctgatctgcattatcataggaaaatattttatgattccacattctcatctctgcataaaatgttgacgtttccccccaaatagactaggatagaatttgaatgataaatacgcaaaacaaggaggaaaatcctgcccaatgtgttgggcattgctcctgcaatggcagtcgcattttgctccgcaaaacaaggaggaaaatcctctgctcctgcaatggcagtcgcattttgctccgcaaaacaaggaggattttatgttagataaaatgattggttttatcggtgccggcaatatgggaagcgccatgatcggcggtattctggatgcatctttagtgacgaccagccagatcatcgcaagtgcacactctcctgagacacttgataagatccggacaaaattttccatagagacaacccagtcaaacgaggtcgttgcagaacgaagcgatattttgtttctcgctgtaaaaccaaataaattttccgaagtacttccgcagatcaaaggtcatttaaaaccggactgtatcgtagtttcgattgcagccggacagccgatcgcaaatatcgaggcgctgctcggtgaggtcagactgatccgcgccatgccaaacaccccggcgcttgtaggcgctgcgatgagtgcactctgtccgaatgacaaggtaacaccagaggaagtaaagctcgttgagtccttattcaacagcttcggccgtgcagaagttgtaccggaaagcatgatggatgccgttgtcggcgtttccggttcttcccctgcctatgtctatatgtttattgaggcaatggcagacgccgccgttgcagacggcatgccgcgcgcacaggcttataaatttgctgcccagtctgttttgggcgccgcaaaaatggtattagagaccggaaagcatccgggcgaattaaaagatgctgtctgctctccgggcggtacgaccattgaggcagttgcagctttagaacatggcggtttccgtgatactgtgatcagtgcacagcgcgcatgttctaaaaaatcatatgatatgagtcaaaaataa

SEQ ID NO: 1129 - DNA, 24617 bp, unidentified
  source 1..24617: mol_type = unassigned DNA
  misc_difference 4706: note = a, c, g, or t
  misc_difference 4707: note = a, c, g, or t
  misc_difference 4708: note = a, c, g, or t
  misc_difference 4709: note = a, c, g, or t
  misc_difference 4710: note = a, c, g, or t
  misc_difference 4711: note = a, c, g, or t
  misc_difference 4712: note = a, c, g, or t
  misc_difference 4713: note = a, c, g, or t
  misc_difference 4714: note = a, c, g, or t
  misc_difference 4715: note = a, c, g, or t
  misc_difference 4716: note = a, c, g, or t
  misc_difference 4717: note = a, c, g, or t
  misc_difference 4718: note = a, c, g, or t
  misc_difference 4719: note = a, c, g, or t
  misc_difference 4720: note = a, c, g, or t
  misc_difference 4721: note = a, c, g, or t
  misc_difference 4722: note = a, c, g, or t
  misc_difference 4723: note = a, c, g, or t
  misc_difference 4724: note = a, c, g, or t
  misc_difference 4725: note = a, c, g, or t
  misc_difference 4726: note = a, c, g, or t
  misc_difference 4727: note = a, c, g, or t
  misc_difference 4728: note = a, c, g, or t
  misc_difference 4729: note = a, c, g, or t
  misc_difference 4730: note = a, c, g, or t
  misc_difference 4731: note = a, c, g, or t
  misc_difference 4732: note = a, c, g, or t
  misc_difference 4733: note = a, c, g, or t
  misc_difference 4734: note = a, c, g, or t
  misc_difference 4735: note = a, c, g, or t
  misc_difference 4736: note = a, c, g, or t
  misc_difference 4737: note = a, c, g, or t
  misc_difference 4738: note = a, c, g, or t
  misc_difference 4739: note = a, c, g, or t
  misc_difference 4740: note = a, c, g, or t
  misc_difference 4741: note = a, c, g, or t
  misc_difference 4742: note = a, c, g, or t
  misc_difference 4743: note = a, c, g, or t
  misc_difference 4744: note = a, c, g, or t
  misc_difference 4745: note = a, c, g, or t
  misc_difference 4746: note = a, c, g, or t
  misc_difference 4747: note = a, c, g, or t
  misc_difference 4748: note = a, c, g, or t
  misc_difference 4749: note = a, c, g, or t
  misc_difference 4750: note = a, c, g, or t
  misc_difference 4751: note = a, c, g, or t
  misc_difference 4752: note = a, c, g, or t
  misc_difference 4753: note = a, c, g, or t
  misc_difference 4754: note = a, c, g, or t
  misc_difference 4755: note = a, c, g, or t
  misc_difference 4756: note = a, c, g, or t
  misc_difference 4757: note = a, c, g, or t
  misc_difference 4758: note = a, c, g, or t
  misc_difference 4759: note = a, c, g, or t
  misc_difference 4760: note = a, c, g, or t
  misc_difference 4761: note = a, c, g, or t
  misc_difference 4762: note = a, c, g, or t
  misc_difference 4763: note = a, c, g, or t
  misc_difference 4764: note = a, c, g, or t
  misc_difference 4765: note = a, c, g, or t
  misc_difference 4766: note = a, c, g, or t
  misc_difference 4767: note = a, c, g, or t
  misc_difference 4768: note = a, c, g, or t
  misc_difference 4769: note = a, c, g, or t
  misc_difference 4770: note = a, c, g, or t
  misc_difference 4771: note = a, c, g, or t
  misc_difference 4772: note = a, c, g, or t
  misc_difference 4773: note = a, c, g, or t
  misc_difference 4774: note = a, c, g, or t
  misc_difference 4775: note = a, c, g, or t
  misc_difference 4776: note = a, c, g, or t
  misc_difference 4777: note = a, c, g, or t
  misc_difference 4778: note = a, c, g, or t
  misc_difference 4779: note = a, c, g, or t
  misc_difference 4780: note = a, c, g, or t
  misc_difference 4781: note = a, c, g, or t
  misc_difference 4782: note = a, c, g, or t
  misc_difference 4783: note = a, c, g, or t
  misc_difference 4784: note = a, c, g, or t
  misc_difference 4785: note = a, c, g, or t
  misc_difference 4786: note = a, c, g, or t
  misc_difference 4787: note = a, c, g, or t
  misc_difference 4788: note = a, c, g, or t
  misc_difference 4789: note = a, c, g, or t
  misc_difference 4790: note = a, c, g, or t
  misc_difference 4791: note = a, c, g, or t
  misc_difference 4792: note = a, c, g, or t
  misc_difference 4793: note = a, c, g, or t
  misc_difference 4794: note = a, c, g, or t
  misc_difference 4795: note = a, c, g, or t
  misc_difference 4796: note = a, c, g, or t
  misc_difference 4797: note = a, c, g, or t
  misc_difference 4798: note = a, c, g, or t
  misc_difference 4799: note = a, c, g, or t
  misc_difference 4800: note = a, c, g, or t
  misc_difference 4801: note = a, c, g, or t
  misc_difference 4802: note = a, c, g, or t
  misc_difference 4803: note = a, c, g, or t
  misc_difference 4804: note = a, c, g, or t
  misc_difference 4805: note = a, c, g, or t
ccaaaaagacacagagtaatacagatccggggaaaaaaccatcggataacgtgtcgaaggatgattcacagacaacagaggataaaaaaccttctgatggcggcaacaatacatccgggacaacagatggtcagcagacaaagaagaaacagaccataaaagcaaaaaatatcacaaagacatacagtacaaaaacattttccatcggagcaaagacaaatggtggaggtaaattaacatacaaggtggcagataaaaaaattgcgaccataagtaagaccggaaagatcaaactgaaaaattatggacagacaaaaattacgatcaaagcagccgcaaaaggaaaatataaggcagcaacaaagacgatcacattaaccgtaaaaccggtaaaggtaaaagtaacctctgtaaagcagctaaaggcaaagacgttacaggtaaagtggaaaaaggataagaaggcatccggttatatcattcagtactccacagataagaaattcaaaaagaatgtgaaaaaagctgttgtcacaaaaaaccagaccgttacgaaaaagatcacgaaattaaaaccgggaaagaaatattatgtccgtgtgtgtgcatataaaaattctcacggaaaaaaagtacagggaagttatggtacggtaaaaagtgtaaaattgaagtgatatgcatcggcataaaagtggtaaaggatggagaaacgttatgaaaatgaaaagaatactgactggaatgctgggagcagctattttagctgcaggcgtaaatctattgtccgtacaggcggcagaaaatgcaggagtgatggaatatatagctgcgacagaatacatagaggaaacagaagcagcagagccggaaaatgcagaaaaacaggtgtttgaaactgaagaagatacaaaaacagcagatacgggtgaatttacgatcaacaacggtctgttgacaaaatataccggaacggcagagacggttacaatcccttcaaatgtcagtagaattggcaagtcagcatttcagaataataaatacatcaaaagcgtaatcattccgggaaatgtacggaaaattgaaatactggcattttatggatgcagcaatctggaaagtgtcacaatggcagaaggtgtagaagagattggtatgcagacattttccgaaactcatttgaaaagtgttgttcttcctaaatccataatcaaaatggatagacttgtgtttacaagctgcaatcggctgacaagtattgattttacagagggcacttataatattaatggtgatatcataggttcctgtgctgcgctgacagagataaaggtttcaggcaataatacgagatatcaggttaaagataacgtgttatatgaaaagaatggaaaaacagtttgttattgtccgtcaggccgcaagactgatatgaatgtgccggatggagtagagcatatcggagattttgcattctgggattgtcttacaacgaaagttacacttcctgatagtgtaaaaagtattggagaacgggcatttttttcgaccggaatggagacgatgatacttccggcgaatctggagtcgatcggaaaagaagcatttttttattgccaaaatttaaaacagatcacaattccggctaagacaacaaaaataggaaacaatgtgttcggcagctgtgatcacttagagacgatcaatgtggcggcagggaatacgatatacagatcagaggatggcatattgtatggcacagaggaaggcagactcgtgttgattaattgtcctgctgggaaaaaagggaacgtgaagatcttagaggggacggtgggaatccttgatggttccttcagtaactgtgaaaagattacatcggtagatatgccggacagcgtaaagagcattggcgaagatgcatttaaatcctgtctctcgcttataaaagtccggttctcaaatcagcttacggatataggaaactatgccttttataggtgtgattccatgcagcaggtacatctgccggacagtgttaaagatttgggggcatgggctttccggtattgtgatgcgttaacagaggtaacaatttccaaaaatatttcggatattccggagaaagcgtttggtgactgcacaaatctgaccggtattaccataccggacggggtaaaaacaatagcagacgatgcgttttcatatttcagcaatttaacgatatactgtagttcaggttctgctgcagaaaaatatgcgaaaaataaaaatattgaaagcaaggtaactgacgaacggaaaacccagacgattacgacagataatgataacattgaaaaaacggttggagatccggattttaagataactgcaaaaacaaccggggatggaactctaagtttttattcgggaaacgaagatatcattcaggtatctgaaaatggagctgtaaagatcatcggagcaggtacgaccaatattatgatcacggcatctgcgacgcaaaattgtaaaatggcgcagacagaaatttatattacaataaaaaataaagaaacggatcaaaagcgtgtgcaaaagatcacgtattcttatcaggcagataaaaaggatctgaatattttctatcttgacgcaaagtcagatggggatggtaagatatcttaccggtcagaaaacgaaaaaatcgtaaaaatagatgcagatggaaaaggatatatcttaggttccgggacagtaaaaattattatctcggcatcagagacagatacctgtgcggcagcgcagaaaatagttacgttaaatgtagaaaaaataacagatcagacagatgaaccggggcagacacaaaagccggatcagacagaaaagccggatcagacagaaaagccggatcagacagaaaagccggggcagacagatactccgaatcagccggataagccgtcagaccagaacggtaatgccacacagcagaaaaagaaacagaccataaaagctaaaaatattacaaagacctacagcacaaaaacttttgccataggtgccaaatcaagttgtggggcaaaactgacctacaaggtggcagataaaaagatcgcagccataagtaagaccggaaaaatcaaattaaagagttacggacagacaaaaatcacgatcaaagcggctgcaaaaggaaaatataaggcagcaacaaagacgattactttaacggtaaaaccggtgaagaaccggattacttccctgaaatcaacaaaagcaaaaacgtttgaagtaaagtggaaaaaaaacaaaaaagcgtctggttatatcatcgagtattccacggataaaaaattcaaaaaaaatgtaaaaaaagttgttgtcacaaaaaacaaaaccactaccaaaaaaatcacaaaattaaagccgggaaagaaatactatgtccgcgtatgcacttataaaaattcacatgggaaaaaagtgcagggagattacagtaaggtgagaacggtaaagatccgaaaataattgcaaagagaaaatgataaaaaatcctgccggattggagtgtggactccaggtacggcaggattttttgggtgacagcatttttgcttttataagaataatttgttcttaatatgtgacaagccggtgttctaaagatttaatctcatcgtgcagtataaatctcgatcgcttctgctacaaaagcagcagttacggcaccggcggctttgtcaatattttctgtaaattcggcaccggaagcatacattttaccaagcccgtttaagatctcattggaacattgataaaagtgctctgaaatataatcctgtaggttttttaccagaagctgtacttctttgctgccaggttctttgttctttatttttccaaactctacaaaaatgagcataagatttttccatgctgttttttgtgtctcggaagactgattttttgtcttttcttcatattccttgtattctgcagtctgtccccattgtttttttgcctctctggcatactcgtccattttggctgtgttaaatacgttaaaatccattttatttactcctgtcgttttaattttacgagcaaaagcaatcaagccttcaagatgctcctttttcattgttaacaattcaatctgctgggacagtgctttgtcccgatcaaaatcaggtgcatcaatgattctgttgatttcttttaacggaaattccagttctttaaacaataaaatctgttgcagccgctctaatgctgtatcgtcatacagtcggtagccggacgcagtataaccgtcgggttttaaaagtccgatggtatcgtagtattgcagagtgcgtatactcactcccgtcaatttgcttacttcatttactgtcatcatggtcatttcctccgctcgatgaggacactctaaactattacgccgcgtaggagtcaataggttttttgaaattattttcaggtcatatccgaagtcccattaaaatatatgtatcttcacggattggagtgaatttgttttttgtccagaacgaatagctctgtgggtttcccttgtcaacgccaagccggatttctttatatccagatgatttcagacaaaggatcacgtcgctgatgatcccggaaccgacacctctgttctgatagcgtgtgtctgtcataaataatccaatgaaggaaatttctttttnnnnnnnnnnnnnnnnnnnnnnnnnnnnnnnnnnnnnnnnnnnnnnnnnnnnnnnnnnnnnnnnnnnnnnnnnnnnnnnnnnnnnnnnnnnnnnnnnnnnctgttctgatagcgtgtgtctgtcataaataatccaatgaaggaaatttctttttcgggataatcaaggattaaatccatgagtccaaccagtgaatcattttcgaaaaaaccgacatagaatttatcatcatagccctttcccggtggtaaggctcccatatcatctaaaatactttcccttgtgacaaagggcggatgatattgataaaagatatcgtttttgcagctcatatcatagatgatatctacatcattttcgtcgagttttcgtacagagtatttttgtgataaagaatttatattcatgttcatagatcctccattataatattggggttcaatagtttttcacaacatgatgactggcaaagtgcatctgacatcataagatattgaaatatcgcagattgggcatatggcaaagaaactgcagcagtatacccacaaaaccccttgattttcctgcgttttgggtatatataataaaaacggatctgctatgcccattatcagtgaaaaatcactcaaaattcccgtatttttgggtataaacagcagattttttctgtatatacccaatcgacaaaaattcatgatcaattttcactcaaataacgaccgctgaacgtatttttccggaaaatgatgcagataagcaaaacattcatccggcgaacaaaggatgccagccttttggcattgttccacgatcattggaatgagcattttttcattcgggcttggcaggttgtaggcattaccgtaagtgcggatatatttttccttcatccccggaaaatctttatcgagggcatggtagaaatattcccggtcgccatctcggagagtcacgccaatgccaaagaatataattccctttacgccggcgtccacgcaggcatccagcagattttttatgttatcagcagtgtcattgataaacggcaggatcggtgtgagccacactacggtgggaataccggcttctttacatttcatcaggacgttgatgcgctctttggtggtggaaacatctggctctatctttttacataaatcttcatcgtaagtggtgagtgtgatctgcacgatggcttttgccttttcattgatggacgttaacaggtcaaaatctcttaaaatccgggctgactttgtctgtaccgcaacaccaaattcataccggtcgatcagctctaaacaccgcctggtcagcaaaaggcgctcctccaaatgaagataaggatcgcacatggcaccggttccgatcatacatttctgacgcttcgatcgcaaagccttttctaacaattccggggcattttcctttacctcaatatcttcaaatgcatgtgtaaaaccatagcacctgctccggctgtcgcagtaaatgcatccgtgggaacatccacggtaaatattcattccgttatcctttgataaaagcctcttcgcctgaacaaaatgcatgagaaatctcctgtagttaaaattaaaaatccgattaatcccattaaaacataagtaaagaaaaatcacaatcaagatcagaacaaaaaaataatgaggaaacagtcgtaacctacagagcatagatttcccttttttcggtatcgagggcatgtagaatgcagttttccgggtgccgccggcagatttgagactttggaagaaaattagaaaatcttagtatgcctgttcactcacagtgttgtgctgccatggacggcagcacaagtcctgatgtgccagggaaggcacattcaggacgtacacgtcactccgaaaccaactcaaacaggcatacttagcttttcttattttcgcacaacggaaccaaacctgccagcggcacccggaaaactgcgccttacactgtcccttaatacctaagtaccattttgcaaaactttaccaaattaccttgacaaatatttccatcagtcatatactttgaaaagctaattatttgactatcaaactatttgaaaggcaaatgattacatgaatcagaaaataagaaaagaaaatcagcccacaataaaaataagggcagggcgctggaaaaatgataaggcatgcgcagaaaaggagaaaaaatatgttagagaaaatgatcccgattattgcagagcagttaaatgtaaatgagtctgaaatcaaggcagagtctaatttcaaagatgatttaggagcagattccttagatttatttgaacttgtcatggctcttgaggaagagtttggcgtggagatcccatctgaggatttaccttctatcgtaactgtcaatgatgttgttgagtacttaaaaggaaaaggtgtggcttaagtatggaaacaagggtaagtaaactgctgggaacgaaatatccggtcattcagggtggtatggcatgggttgcggaatatcatcttgcagcggcagtttcaaatgccggaggtttaggtatcattggagcggcaagtgcaccgcctgaggtggtcagagagcagatcagggaggcaaagaagctgactgacaaaccgtttggcgtgaacgtcatgctgttaaatccaaatgcagccgaggttgcacagatcgtcattgaagagggcgttaaggttgtgaccacaggtgccggaaatcccggaaaattcatggatgcatggaaacaggcaggcgttgttgtgattccggtcgttgcgagtgttgcaatggcaagaatgatggagcgtggcggagcggacgcagtgattgcagagggaatggagtcaggtggacatatcggtgcacagacgacgatgacactcgttccgcaggtggcagatgcggtacagataccggttattgccgcaggaggaatcgcagacggcagaggcatggcagcggcatttatgcttggtgccgaaggagtacagatgggaaccagatttgtggtggcaaaagaatccatcgtacatccgaattacaaggagcgtgtcatcaaggcaaaagacattgactcagaagtgaccggcatgagcaccggacatccgatccgggttcttcgcaaccagatgagccgcgaatatttaaaaatggaaaaagagggcgcttcatttgaagagttagagcaccttacacttgggtccctgcgcaaggcagtcattgacggtgacgtggtcaacggaagcctgatggcaggacagagcgccggcatggtaaaaaaagaagaaagctgtaaagagatcatcgaggacgttgtgacacaggcggagtcactgcttggaagatagtgcaaaaataagcgcaaaaaacggaggttagtgtgaaaaataagatttttcacacgcaagatttgtgcttacgcacaaacttgagatgcgcaaaagacagcgcaagaatggagattaacatgggaaagacggtttttatgtttccgggacagggagcacagtacataggaatggcaaaggatttttacgatgccatcccggaatgcagagaagtatttgaggaggcatccgaggcgtcaggacttgatatcgctgcgttatgctttgaggaaaacgacaagatcaatatcacggagtatacacagatctgtatgctgaccgccgaggctgcgatcctgcgtgcattggaggtaaaaggctataaagcagatgtgactgcaggcttaagcctgggagaatatggagcattgattgcctgcggagcactgagcagaaaagatgcatttgcactggtgcgcaaaagagggatctacatgcaggaggcggtgccggagggcggagccatggcagcagtcctggcactggataccgcgcagattgaggaagcctgtaaaaaaacagagggcattgtatcgatcgcaaactataactgcccgggacagatcgtcattaccggagaagaaaaagccgtagcggcagccggagagctctgcaaagaagccggagcaaaacgtgttgttccattaaaggtcagcggaccgttccactcagcaatgttaaagggtgccggagaaaaacttggcgaggaattaaaacatgtaacagtccatacaccggcaatcccgtatgtcgcaaacgtgacagcagactatgtgacaaaagaagaggagatcaaaccattactggaaaaacaggtgtcctcatctgtccgctggcagcagacgatcgagcgtctgatcgcagacggagcagacaaatttgtagagatcggaccggggaaaaccttgacaggattcatgcgcaagatcaaccgtgatgtagctgcagtcaatattgataaatatgaagactttgagaaatttgttgctgagagcaaaaataaataagatatgccacatattttgatgtgaaaaaagtttggcagctatcagaaaaaaggagaagttatgttaactaataaaacagcactggtcaccggtgcaagccgcggcatcggagctgcaatcgcaaaaagccttgcaaaagaaggtgcatttgtcatcatcaattacaacggttctaaagagcgtgcagatgctgttgcgtcagaaatcacagcggatggcggcaaagcggcagtttacggctgcaatgtatctgattatagtgcctgtgaaaaaatggcaaaagacatcatggagacatacggtcatctggatattctggtcaacaatgccggtatcacacgggatgatcttttgatgaaaatgagcgaggaagcatttgacgcggtcattgcgacaaacctcaagggaacttttaacacgatccgtcatttttcacgctatctgttaaagcagcgttccggaacgatcatcaatctatcatccgtatccggtattcttggaaatgcaggacaggcaaattacagcgcgagcaaggcgggcgtgatcggactgaccaaaagtgtggcaagggaactttcttcccgtgggattacctgcaatgcggttgcgccgggattcattgatacggaaatgacagcgcagatgacagacaaggcaaaggaagcagtgaaaacgcagatcccgctcggcagagtcggaaaagtggatgatattgcggaggtagtgacatttttagcctcggagaaagcatcctacatcacaggacaggtaatttccgtggacggcggtatgagcatataagcagtaaaaacattttgaccgcatggtattgtgtcggatcaaaaaggaaaggcctgaatttggggcttgaaaatggaaaggaaaagttatgagcagacgagtagtggtaacaggaatgggcgcgatcactccgatcggacttagtgtagaggagttctggcagtccataaaagaaggaaaaatcggtttcggggagatcacgaaatttgatacggaaggatacaaatgccatcttgcagcggaagtcaaagatttcgatgcaaaacagtatatggatgcgaaagcggcaagacgtatggaattattctgccagtatgcagtggcagcggcaaaagaggcgatcacggatgcagcgcttgacatggaaaaagaagatccttaccgtgtcggtgtatctgtcggaaacggaatcggaagtcttgggggaattgagcgtgagcataaaagactgttggaaaaaggaccgtccaaagtaaatccgctgttcgtaccgcttgtcatttccaatatggcagccggaaatgtctcgatcgcattcggtttaaaaggaaagagcatcaacgtggtaacggcatgcgcaaccggaacaaacagtatcggtgaggcattccgcagcatccagtacggagaggcagatgtgatggttgccggtggaacggaaggtgcgatctgcccgcttggaatcgccggattcacttcactgacggcactttcctccgagagtgacccgacaaaatgttccattccatttgataaaaaccgcagcggttttgtgatgggagaaggtgcagcgatcgttgtgttagaggaattagagcatgcaaaagcgcgtggggcaaaaatttatgcggaggtagccggatacggaacttcatctgatgcatatcacattacctcccctgctgaggatggtgccggtgcagcccgcgccatgacgaatgcggtggaagatgcaggcatccgtccggaagaagttacctacatcaatgcacatggaacatccacgcatcacaacgacttgtttgaaacgcgtgcgatcaaactcgcttttggcggtcacgcatatgatatgaaagtcaattccacaaaatctatggttggacatctgctcggggccgccggtgctattgaatttgtaacctgtgtcaaagaaattcaggacagttttgtacatgcgaccgtcggttacacgacaccggatgaagaactggatcttgattactgtaaagaggcggtacagatggatgtgccgtatgcactgagcaactcacttggtttcggcggacacaatgcaagtatactgctgaaaaaatacagtgaataattgggaggaaatgcctctgctcaccagtgggcaaattttattttggaaaacagggaggcaattatgtccgttttaacaacgaaacagatcatggagatcattccgcatcgtcagccgtttttgctgatcgacacggtggaagaattagaatccggcgtgcgtgccgttgcaaaaaaatgtgtcagctacaatgagccattctttggcggacattttccaaatgagccggtcatgccgggcgtactgatcattgaagcactggcacagaccggagcggttgcaattctctcggtggaagaaaaccgcggaaaaactgcatattttgcgggaattaattctgcaaaattcaaacggaaagtagtgccgggagatgtgttgatattggaaacagagatcataaagcaaaaaggcccgatcggtgtcggccgtgccacagcgaaggtgggggatgacattgcatgtatcgcggagctgacatttgcgatcagttgaagttaagagagtctggaacagcgcaggtttgataaataactgtaaacaggcaaaaaggggaaagtatggcagcattttttttgaagaagaaaaaagaagtaacagagacggtagaagaaccacagaaaacggtagaggcagcaaaaaaagaggcagagacagttaatacagagccgccggcaacgatcgtctgtccggcttgtggcagagagatcaataagaaaaccgcggaaaaaaataaatatgtctgttatgagtgcggcaattatttccgcgtccgtaccaaaaacaggatccgcatggttgcggataaggatacctttgagccgtggtttgaggaattggagtcaaaaaatccgcttgattttcctggatatccggagaagatcaaagccgcacaggaaaagacaggactgcatgaggcagtcacagtcggaaaatgcaggatctatggacttgagacggtgatcggcgtgtgtgatgcccggtttatgatgagcagtatggggcatgttgtgggagaaaaaatcgcacttgcggtggagcgtgcgacagaactttctcttccggttattttattctgttgttccggtggtgcaagaatgcaggagggaatcgtttccctgatgcagatggcaaagacagcagctgctttaaagaaacattccgaggcaggacttttatatgtgccggtgttaaccgatcctacgaccggaggtgtgacggcaagttttgcgatgttaggagatattatccttgcagagccgggggcactgatcggatttgcagggccgcgtgtcatcgagcagacgatcggagagaaactgccggagggattccagagagcgcagttccagttagagcatggttttgtggatgcgatcgtggagcgtaaagatttaaaaatgacactttaccgcattttaaagatgcatcagaaaacggaaggatatgcaaactttgatccgctgcgcagcgatgactgttacgagccgacagaggtcatgaaagagcgcgccacaaaggcacagcctctttccgcatgggaaaaagtgcgtgcggcaagacgtgcagaccggcttgcatcggtggattatatcgacaatatttttgacgacttcatggaatttcacggagacagacagttcgcggatgatcctgcgattgtgggcggtgttgcctaccttgacggccagccggtcactgtgatcggtattcataaaggaaaagatttaaaagactgcatgcgtcacaattacggaatgccgtcaccggaaggttacagaaaagcactgcgtctgatgaaacaggcagaaaaattcaaccgtccgatcatcacatttgtgaacacatccggtgcattctgcggaaaagaagcggaagaacgcggacagggtgaagcaatcgcaagaaatctctatgagatgtcagccatcaaagttccgatcctctgtctgatgatcggagaaggcggaagcggcggtgcgcttgcactgtcggtcggcaatgaagtctggatgcttgaaaatgcaacgtattcggtactttcgccggaaggatttgcatcgatcctctggaaagatggaaaacgtgcaaaagaagccagcgaggtcatgaagatcacggcgcatgatctgtatgcgttaaatattgtggagcaggtaatcccggagtatggcacggcagacgaaaaagcatgtgagtcaatctcaagatatatgaaaggccatatgaaagaatttttagagcgtcagaatggcaagacaggagagcagcttgccgaggagcgctatgcgagattccgtgcgttctgataaaaaggttactggattattttacagagggcagatggaaataaaataaactctggaatgaggaaaaagtatgaaaatcaaaatcaagggaaccggaagtgcggttccaaaacttcgggtgacaaacgatgatttaagtaaactgatggacacctctgacgagtggatcagaagccgtaccggaatcggtgcaagacatcttgcggtggaggagacgacgacagggcttgctgtcgcagcagcaaaggaagcgttaaaagatgcggaaatgactgcggaagaacttgatcttatcattgcagcaacggttacggcggataagtttctgccgaacttatcctgtgaagtgcagagtgcgcttggagcaaaaaatgcagttgcatttgatttaaacgctgcctgctccggatttttgtttgcattaaatacggttcagatgtatctggaaaatggtgtatacaaaaaggcactggtcattggagcggaaactctttcaaagatcatggactggaatgacagaagcacctgtgtattgtttggggacggtgcaggggcggcggtcgttgaggtggattccgaaacaaattgtaaagcaaagcagccgggtgcagcaaacaaaagcggcattctaagcatggtacagggttccgacggcgcgcggggggaagtcctccgctgtgataaccgtccggtcaataatccgtttgcggtcaacgatacgaaactttcctatgtgtcgatgaatggtcaggaagtatataaatttgcagtcaaaacggtgccaaaggtgatagaagaggcagtgaaaaaagcgggacttgaagtggaggatattgatctgttcgtacttcatcaggcaaatctgcgcattattgagtctgttgcaaaaagactgcatcagccgatggaaaagtttcctaccaatctggaagagtgcggcaatatttctgcggcgagtgtaccgattttacttgataatatcaataaacatggtatgatatgtgaaggtaaaaaaatagttttggcaggatttggagccgggctgacatggggggcgacggttttggtatggtaagggcagcagtaaacagactggctgcagtttacatatgtgtgaaaggcaatcagtactgccatgaataggagtatatttgaatgacggcagatgaaacattaaatgagttattggtaaaattgtttaaaaacattatggagattgagggaaaatctctgatcacggatgaatttaaggatcttacctataatgattttcatgtaatagaagcgattggaatgtcagagccaaagagcatgagcacggtggcaaagctgatgaacgttacgaccggaacgctgacaaaggcgatggacggtctgaccgataagggatatgttgtcagggagcgcagcaagcaggataagcgtgttgtctgggtatgcctgaccgaaaaaggaaaggcagcttatctgcatcatgaagagtttcatcaccgtatgatcgaccacattaaggaagaacttaacgcacaggagacaacggtactgatctattcactggcaaaactggtggattttttccagcaggtatacggggagaatgaagaatcgtagagggtttggacaaagttatggatattatatagatatttgtggatgtttttcggaaacgggaggcatcctttttctttatagaagaatgccagggcagatagtgcttttcaattttctgataacacagtcatgatatattttctcaaataaatgttgtaattacaacatacaatctgaccgaaataaattaatatgataccagagacaaggacatcagtgtgaaaaataagatttttcacacgcaggatttgtgcttgcgcacaaacttaagatgcgcaaaagcagcgcaagaatggaggttttcatgaaacagttagaattaaacaacagaaaagtggcagtgatcggatgcggatttgtaggagcgacatcagcgtttggactgatgcagagcggattgttttctgagatggttttgattgatgcaaatacagagaaagcggaaggggaggcgatggatatttcccatggaatcccgtttgcaagaccgatgaaaatttatgcgggcggttatgacgatatcatggatgcggcgatcatcgtggtgacagccggtgcaaaccagaaaccgggcgagacgaggctggatctggtacagaaaaacgtcggcatttttaagagcatcatcccggaaatcgcaaagagagattatcagggaatcctgcttatcgtatcaaacccggtcgacattcttacatacaccgcacacaagttgagcggaatgccggaaaaccgcgtgatcggttcaggtacggtgcttgacacggcacgcttaaaatatgagctgggagagcatcttggtgtggacagccggagcgtgcatgcatttatcatcggggagcacggtgacagtgagatcgcggcatggagcagtgcaaatgtatcgggaatcccgctaaatacattctgcgagatgcgcggacatttcaatcatgatgactcgatggaacgcattgctgcaaatgtgcgcaacagtgcctatgagatcattgcaaagaaaaatgcgacctattatggaattgcgatgtctgtaaagaggatctgcgaggcaatcgtgcgcgatgaaaaatcaatccttccggtttccggtatgatccatggaatgtatggtgtggaggatgttgtcttgagcatgccggcgatcgttggaaaaaacggaattgagagacaggttccgatttctttagatgaggatgagcagaaacagcttcagaaatcagcacagatcttaaaggagatggcagagcaggttttgtaatttttgaactccctttttacaaaagtgtgtctgatgcatattaactcataattatacgaaacaccacacttttattcattttctattcatttcttactaatgggtattcatttttactctaggttgtcgtgcaatttattagaatggaatttttgaaagagccagcaccttgaatgggctgactctttcaatgtcacctgtaattaacaaactggaatttctcacttcttcattttaggtgcaataagcaacactactgtcacaagaaaatatacaccatacatcaaccatgtaatagtattgttccatggaaaactcatttctggatgattcaatgcaaacattataaatacaatggctataatcagcatgatcaaaccgataatccttgatatactctttttcatgtaaatcaccttctcgtcaaattatagttatctacgtattccatcatcattaaaatgtttttttaaagctttctctgtcggataaattgatacaatcataataaagcattgaattgtcacaagaatcaaccctgcaaatccaatcgtattcttatcactatgatataacggaatatgtatcaaagcagatggtataatcattatccatccaattttccaccaaagtcttccgcagtagtcattcgcaaatttccatgtatccatatttttcattgagcgagttgttctgtagcctgacatactattcatatgttttggacaatgtttccacatcattcttccacaaatgaccatagcaataggaattatcagatcacatattaacataaaccaccaaaaccacataaaccgcacctctcttcacgcatcaatttgtataacagtagtctaacacatgttgataaaaagtactatatacaaactaatgtccgtgatttgctttccataaaaagttcctttcaaaaataaattatattttctagagagatgagcaaaacgaattgatttaaaagttggatttggcagttagcttttgtaaaaccgaaagaatgggaatttttgcatggatcgtgtttggcgtttttattatgctgtatcggttaaatctgaaagatgtatgttccatgcaaaaacgtatggaacaggggaaacaccggttgactttccgggaggaaatcggacagctccttgataagaaattttacatacttgtgctggcactgccggtactgggggtatgtgtatttaacattttaccgattgtatttatgatcctgatcgcatttacaaattatggcggggatattgtaccacctcaacagcattgaattattttgccggacttggtctggcattattactggataaagactgtgtaaaaggaaaagcattctggagggccggttaatccagcttattgcagcctgtgggaaaagtgccattggatttctggatttggatgcgaaatggagtgcaaggctgatcggactttttgtgaattgctggatcagcgttccatccatcatgttacttgcaactggaaatctttctaacagggatgtttctttatatgaagctgcaaagatcgacggggcaggcagatggaaacagttcgaaaaactgacaatgccttttatgctgttttccacgatgccggttttacttggacagtttatcggaaatttcaataactttggtattttttatgtcctgagaggaggacacatttcaatgagtaaaaagtggaaattcggcagaatgatggatacaggcataacatatctgattctcaccgccgtagcatttgtgtttttttcccgtgtctctggctgatcctggcatcgttttcaaaatcgggaaccatttattcatttaacggttttttcccaaaagaatatagttttgcaagttttcagaagctttttactgatacgacactttataactatccgagatggttttttaatacactttttgtggcagcgggaagctgtatattagggacatttcttgtgattttaactgcatatacaatgtcaagatttacatttgcagccagaaaaccaatgatgaaaatcacgatggtacttggaatgtttccatcttttatgggaatgatcgcagtttatcttctgatgacgcagtttaacctgatcaatcatttgtggggcttaatcttgatttatgctgcaggtgcaccgatggggtatctgacacagaagggtttttttgatacgatcccaaaagcaattgatgaggcggcaaggatcgacggtgcaacaaattttcaggtgtttacaaggattaatctgccattatcaaaaccgatcattgtatatacggcgttgccatcttttacatggccgtggagcgattttattttaccgaaacttctgctgaaagaaaaggatctttacaccgttgcagttggactgatgagcttagatgaaacggagtttgcaagattcgcagccggaagtgtttttattgcagttccaatcgttatcctatatttctttcttgtaaaaaatatggtgaacggcatggcgcagggagcggtaaaaggttagatacggtttacaatcagttattgttgaatccgttttttcatgttaaaatgggcgcaggcattgcaatgacatttccttagcagtttaagggatgacaagacttttcggaagaaagtgcctgtgacaggatgtttacgaaagaagacggaggaacggtatgagtaagggaattgcgggaaaaaataactgggcattgtttttactattgctggcagggatcgtacttggaggttttatcggaagccttgcagcgggagtgccatttttaagctggctgaattatgggcagacatttggatttgcaaatccaatcgtgctggatcttggaatcctggtcattacattcggactcagtatcaagattacgatcgcaagcattattggtgtattaatcgcaattattatttatcggtttttataaaaaataaaagtttaaaatgcaggtacagatggggcgcctgcattttttaatgccagatgattgttcatcaaaacggactgtgttatagtaataaaaaatatcacaaggggggaattcgggtgaaaaaattattattaaagaatgcagtgatgctggcagtcgttatattctgcattggttccgtcaactgttatgcagccaccagtacggggatcaatgtcaattatcacagccagaaggaaattaaggattacctgaaaagtaaaaaggtaaatattgacgcagagacgacctacagtaagaaggcatcggatgtaaagccgtatcaggcgggtacgatcagtgagagcagtcagaaatcagcattaaataccatgaatgcgatccgttatattgcaggaattgatgcagtggggcttgattcttcttataccaaaatggaacaggcggcagctttggttaactcagtaaatggaaccttatcacattttccatcaaaaccggcaggaatggccgacagtctttatcaactgggggcgtccggtgcatccagcggaaatctttcctatgcaagctggaaatgcggactcgggtatcatctggtaaaagcatggatgaatgatggtgatgattacaatatagaccgcgtcggacacagaagatggattttaaatccgccgatggaaaaaacaggatttggctgggtatatggatcacatggaacttatgcggcgatgtatgcatttgacaactggtatgaaccgacggattattatggtgtggcatggccggcccagaatatgccggtagagttttttggcagcagttatccatggagcatcagcatggggaaagatgtggacaaatctgctgtaaaagtgactctcataaggcagtcggatcagaaaaaatgggctttttcagaaaagaaagccgatggctattttaacgtggaaaacagtaattatggacagaaaggatgcattattttccgtccggaaaatctgagttatcagccgggagatacatttgaagtaaaaattacaggacttgaccagaaagtatcttatacagtgaaattcttttccataaacagtgcggcagagtcagatgaaaagcagaaagaatcgaagatcacggcgaaaaacatcacaaaaaccttcagcaccacaacattttccatcaatgcgaaaacgaatggaaaaggaaaaatgacgtataaggttgcggacgaaaaaatcgccgctgtaagtaaaaaaggtgtagttacacttaaaaattatggagagacaaaaattaagatccgtgtagctgcaagtggtaattataaggcggctgaaaagacgatcacgttgacggtaaagccggtaaaagcaaaaacgggttcgctgaaatcgactgcaaagggcagttttgcgttaaagtggaaacaggataagaaggcgaccggctatatcatacaatattctaccgataaacgttttgagaagaatgtgaaaagcacaacagtttcaagtaacaggacgacatcgaagaagattggaaagctgaaagccggtaaaaaatattatgtcagaatctgttcctataaaaaatccggtggaaagaatataaaaggcgcttacagtgacgtaaaaaccgtaataacaaaaaaatagacaagaaaacgatacttagatgatataaaattttttgtggaaaatgaataattgaacctgaaatcctgcaaaaaatgccttgttacactttgaaactttaataatttagtgaaataaagaaaaaaatattgcacatggattcattttataataaaataagtgtgtcaaaacgaaaccagcgggagaaccgttaggagcatgcagtgtaaagcacattgtatggagtatatactaaattaagtaaggagagattgtaaaatgggatacgttgatgaagtactcgaagtagtaaagaaaaaaaatgcagatcagcctgaatttttacaggcagtaacagaggttcttgattccttaagacctgttattgatgcaaatgaagagttatacagaaagaatgcaatcttagagagaattacagagccggatcgtcagatcatgttccgcgttccatgggtagacgacaatggacaggtacaggtaaacagaggattccgtgtacagtttaacaatgcgatcggaccgtacaagggcggcttaagacttcatccgtctgtaaaccttggtatcatcaaattcttaggatttgagcagattttcaaaaactcacttacaacacttccaatcggtggtggtaaaggtggttctgatttcgatcctaagggcaaatcagacagagagatcatggcattctgccagagctttatgacagagctgtcaaaatacatcggagcagatgttgacgtacctgccggagatatcggaacaggtgcaagagagatcggtttcatgttcggtcagtataagagaatccgtggttccttcgagggagttcttacaggaaaaggacttacttatggtggatctcttgcccgtacacaggctaccggatatggtctgttatacctgacaaacgcattatggaaagatcacggcatgagtcttgaaggcaagacagccgcagtttccggatctggtaacgtagctatctacgcaatcgagaaagcacagcagttaggcgttaaagttgtaacatgttctgattctacaggctggatctatgatccggaaggaatcgatgttgcattattaaaagaagtaaaagaagtaaaacgtgcacgtctgacagagtacgcagctgcaaaatcatctgcagagtatcatgcaaaacagaatggtgagcacggtgtatggcagtacaaagtagatttagctcttccatgtgctacacagaacgagttagaccttgaggatgctaagatgttagttgcaaacggtgttacttccgtaacagagggtgctaacatgcctacaacactggaagctaccaaatacttgcaggagaacggtgtattattcgtaggtggtaaagctgccaatgccggtggtgttgctacatctgcacttgagatgagccagaactccgagagactttcctggacattcgaagaagttgatggaaaactcaaaggaatcatggagacgatctatgctaacatttctgacgctgcaaagagatacaatgcaactgttggtggacagactgactatgttgccggtgcaaatattgccggatttgagaaggttgtagatgcaatgttagctcagggtgtatgctaatcaattagcagataagtcccgattacagctaaataacgattgagaaatgtccccgtatattgctggaaacggtagtatacggggattttatttgtattaggggtagctagtgcagatgttgtaattatgcacaaaattttcagaaaagaatttgctttgtttgacataaaaagacggtgttcatataataatagtacccagacagaaaatctgtctgggtgcgctgacaccttaaaaatctgacattttagccagttcgtaggctggcaggttggggagcaacagaaaaactccacagttaagccgcacatggagaggcggacggttggcagacaacagaaaatcagcattaaaagaaaagagaaaaggttgtccgaaagggcagcctttttcaagttaatggggtatggatggcaaagtatgacaagaaagcagctttaaagattatgatagaagctgtaaagcaatacgaagaaaaactgaatgataaacagtttctaatcatatatcgggaagggaaagatataaagacagtaaatgtaggatttcgggatatgaactttttacatatgactggtgtgaaaacaagattgtctgcacaacaattttatgcggcttgcctggaatcaaaactttctgagtatgattttgaaattgataataaaggaaaagtgcaacagaaattaatggtgttaccatatctggcgaagaaccagagtatgcataaacttagggtaagtgatgaaatatttgaaatgattttagtggatgaggaatgaaaatagtaaggttataactcccttgttgtccaacccccgaaatggtagtataatcaaaacacacaaatcaataaacaaatgggggcaacacatatgaacattttattttttctgacaccgaaggaagacgtagcacatgtggaagagacggacaccatgcgtcaggtgcttgagaaaatggaacatcacggttacacagccattccgctgcttggtgtggaaggaaaatatattggtacgatcacagagggagatctgctctggtttttaaaggaccgcaatttcccggatctgaaactgcttgaggacatgccgatcacatcgattgagcgtagaagggataatcaggcggtaaagattgatgaatccatggagaatctgtttgacaaggtaatgaaccagaactttgttccggttgtggatgataaaaaggtgtttatcgggatcgtgaccagaaaagatgtgctggcatatcttgggaagaaagcggctgctcaggcataatgataaaccgtccgtttgcgccgctgataaaaaatcgataaaaacagtgtcacaaactccgccaccgggattgcaagccacacaccggtcaccccccaaatggctggcagtgtgaggagtgacagcaggataaaaacaaaggttcttgtaaaggatatgaccgctgaggtttttccgtctgagagtgccgtaaagagagcggatgaaaaaatgttatatccgctgaacaaaaaggtcacacagaataccgaaaaaccgctgacggcaaggtcataagtcgctgtttttccaccgacaaacaagagcacgatcggctcggagagcaggttacagcaaatagtaatgataatagaagaaacgatcacgaagcgtctgcagattttgcagacgcttttcagtccgcctgtattttttgcaccgtaattgtaactgatcacaggtgcaacacccatggaaaatccaagaaaaagcgcattaaataaaaattgggaataaagcagtatcgtgattgcggcaacaccgttttcgccggcaaggcgcagcatgatcttattgaatgcataagtgatcacggcgtttgcaatgtttgtcaccatctcggatgcaccgttaaaacttgcagcggaaaggacacttccatgaaaatgaaattttgtaaaataaagatctcccttgacaaagaaaaagtaga

SEQ ID NO: 1130 - DNA, 25879 bp, unidentified
  source 1..25879: mol_type = unassigned DNA
caagcagatgacctacgccgctctgtgcggctttggcgagaccatcaagaccgagggcaaccagaacaatgagctgggaatgccccgcaccctgatgcggctggaaagcagcaccgagtacgcggtcatcgagatgggcatgagccacgccggcgagatcgaccgtctggcgcgggcagcacggccggatgtgggcatcattacctgcatcggcgtgtcccatatcggcaatctgggcagtcaggagaatatctgcaaggcaaagctggaaatctgcaacggtctgccggagggtgcgccgctggtgctgaactacgacgaccccttcctgcgcaaggcagtgctccccgcccatgtgcgcccggtgtggttcagtttgagcgatgagaacgccgatgtctgcgccctgtccatccggcaggagactgacggcatgagttttgtgctggaggatcaggagcacggcacctttgtggtgaacatccccgccatgggacgccataatgtggcaaacgccttggctgcctactgcgccgccacccggctggggtgcgacgccaagagggtcatccatggcctttccaactttgagcagaccggacgccgccagaaggtggtggacagcgagggcgtgaccgtcatcgaggactgctacaacgcaaacccggacagcatgaaggctgcgctggcgatgtttaaagatttcccctgcaagcgccgctttgccctgctgggcgatatgctggagctgggcgatctgagccgcgaagcacatgaggagctgggacgccttgccgccgagagcgggctgtactgcctgatcacctacggcgagcaggccaagcgcaccgctgtggtggctgcggccaagggggtaaagaccctgcacgcggacagctaccgcgaggctgccgatgccctgctggaccgggtgcagcccggcgatgccgttctggtaaaggccagccacggcatggcactggaaaaagtgctggatatcttctacgaagagcataaagaagcggaagtataactatttggcgaaatggagtgtctgatctatggagcgtttcgccttggcagcggcggtggtgctgggctttgcccttacggcagctttgtgcagcctgtttgtgccgctgcggcgggtgctggaacgccgcgaacaacaacagcagccggtacagtctgagcagccccggcctgcacccctgcgcgccccgctgtggggcgggctgtgtgcggcggcgggcacggtggctgcggtgggcgtgggctggcttgccgcctgcgtgggtcagccggagctgctgggcagcgagggccggttgatgacacggctgctcacggcgctggccggaagccttgcctttggggcagtgggtcttgcagaagatgttgcccggatgcgcagcccggcggcgctggggctgcggcgggacgtgcggcttttgctggaagcactggccgcggcctttgtccttttgctgctgcgggcagcgggctgtctgccccgggggctgggcgtgcccggggcggggtatgtgctgctgggcagcgccgtgccctttttgtgggcggtgctcatggtggcactggccgagtgtgcccgcatcgccgagcgggacgagggcgcggtgtgcggtgcggcctttgtggccatgctggcgttgatgatggtagaagccggcttgggcgtgtccgggctggcggtgctgcccggagcgttggccggggcactggtggcactggggctgtgggcgttccctccggcaaggctgggggtgggctgctgcggcagtctgctggcagcgggtgccatcggctgcatcccgctcagtctggacatgaccagcctgactgtgccgctggcgctgcccttctgggcggcgggcggtcttttggcagcgcagctgctgtgtgcaaagcgcaccggcaagcccttgcgctgctgggtaaaaaagcataaaatgagcccggagacggtgtttctgtgcggctttgcgctgagcgctgtcggctatgtgctggcgctggcgctgctgcgctggtgctgaccgggcacagagagggaagggagcgcagatggcgactatccgcaaaaaacacagagcgccggtgtcggtgttccagcgagatccgggcccgtggtcccggctgctgatcgactggctggctacgctggctgttattatgatctttgggctggtgatgctgttcagcgccagctacaccaccggttacctgcgcatgggcgacagcttccactacatcaagcagcaggcgctgtgcatgatgctcgggctggcctgtatgttccttatgagctatgtggaccaccgttttctgcgcaagatggtggtgccggggtacatcatcgtgctggccatgctggccgtcaccctgaccatggcacccctgaacggctgccgccgctggatccgcttcggcgggcttacgctgcaatcctcggaggtagcaaagtttgagatgatcctgttcagttcccatcttgcggccaaagcgccgcaggtggagcggctggacccggagcgccgcatcctgcttaccccccgggagtggctgcgggtgcgggtgtggaagcagctggtggtgccggtgctgccccttgtgccggtggtcatcctgctggcgctggagccgcatatgtccggcatcgtgctgacggtggcggtggtgggcaccatcctgctgctgtccggcagcggcggtgtgttgacatgggcgggtgccgttacggcgggtgccctgctggaaacgctgctctctcatgtggactccatcccttacctgcaaaagcgtctggacggctggacgcaggatctgagcaagatgaccgaccagaccgtgcagagcctttacgccatcggctccggcgggctgaaagggctggggctgggcaacagcgtggaaaagcagctttggctgccggaaagcaccaacgacttcatcttcagcgtggtgtgcgaggagctgggcttcatcggcgcagtgctcatcatcgtgctgttcgtgctgttcatcgtgcaggggctgctcatcgcctataaggcggagaacctgtactgcaccatggtgggcatcggcatcatggcacagatcgcgtggcaggtgttctgcaacatcgccgtggtcaccaataccctgcccaacaccggcatcagcctgcccttcttctcctccggcggcacaagcctgattttgctgctggcagagatgggcgtaatggtgaacataggccgcaacggcgagcgggtggcgcagcagcgggagcagatgcgtgcccagcgggaagcagcccgcgccgagcgggaagcggaacttgcccgcaagaccattgatctggcttctgcccgcgcagctcgcacagaacagtaaaacaaaccgcaagcccgcccggccgcaggccgggcgtttataaggaggaatcaccatgcgtgttctcatcgcagccggcggcactgccggacatatcaatcccgcactggccattgccggtgctttgaaaaaggccgaccctaccgccgagatccactttgcaggccgtaaggagggcatggagtaccgtctggtcacacaggcgggctaccccttccaccacatcgagatcaccggcttccagcgcaagctcagcctgaacaacatcaagcgcaacatcatcactctgtggaatctggcgctctccggccccaaggccaaggccatgatgaaggaggtaaagccggatctcgtcatcggctgcggcggctatgtgtccggcccggtggtgcgctgcgccgccaaaatgggcatccacaccgccctgcacgagcagaacgctttccccggtgtgaccaacaagctgctggccccggatgtggatatcgtgtttgccgccgtgcccgccgctgtggaaaagctgggcgcaccggacaagacccttgtggtgggcaaccccgtgcggccggaagtgtttgcacaggccgcgaaccgcgaagccatccgcgcacagctgggcgcgggcgaccgcaccgtcatcctgtccttcggcggcagcttgggtgcacgccgggtcaacgaggtggtggcagacctctgcgcttgggagcagcacgagcacaagccggtgctgcacctgcacgccaccggacagtacggcgtacagctgtttgagcagctgcaaaagcagaaggattttacccccggcgacagccttgtggtaaaggaatacatcaacaatatgccggaactgctggctgcggcagatctcgtcatcagccgcgccggtgcgctgacgctggcagagctggaagccgtgggacgcgccgctgtgctgatccccagccccaatgtggcggagaaccaccagtactacaacgccatggagctgcaaaaggccggggcagctgtggtcattgaagaaaaagacctgaccggcgaaaagctggtgcagactgtttctactatgctggcacagcccggcaagctggccgaaatgggcaaaaacgcccgcagcctgtcggtggatgacagtctggaccgcatcactgcggcgctgctcaagctggtaaagaccccgtgatgcagacccggaataaacaagaaggaaggtgcgaatgatgcagcagaaccgtgaccgcaacggcagaccccggaacaccagaccctatgacctgaaccgggatgtggcgcgcacctctgcgccttcgcaggatcatacgccccggagcaccggcagcagccgctacggctacaacggcgagccgctcagccgcccgccctcccgcagcgccaacggcagtgtgcgctcctcccgggcggataacagcatccagttcccaacccagccccagtcccagacccgccgtccggcgcaagggcaggggagcaataccacccagtaccctgccggcagccgcccggcgggcagcagaccgaaaaacgcgaagtccggcggcaaacagcgccgcccggcaaacaatgcccgcagcgggcagaacaaccggaacaaccagaaccacccgaacgcgcaaaaccatccgaaccggcagcaaccggcaggcagccagagcgccccgcagcaaagccctgcccggcgggaaatgcgcaaaaagcgcaaggtgacccgcgccacattgcggcgccgccggatgctgcgccgcctgaccgcctttgccatgctgctgtgcgttattggcgcgggcatctacctgaccatgaccatgctgttccgcatcaactccattcaggtgcagaccccggacggcaagcaggtgaccgaaatcgctggctactccgcagacagcattttgcagcggatgggcgtgcagctggaggaaaacatcttcagctttgaacccggcgaaaaggccgctgtgctggagcagaacttcccgctgttgggctccatcaaggtgatccgggactaccccaataccgtggtggtgcaggtgaccgaagccgtgcccgcctatgcggtgcaaaacggcaataaatggcttgtgatctcggataaatggaagatcctctccgaggaaagcacccagcctgaggggctttgcaccctgtacggcggcaagctgcaggacaccaccccgggacagggtttctggttcgtggacgatgcggacgcggcaagcgcctccgggtcggaaaccgccgaaagtgaaagcacggtgagcaccgagaccgcccgcatggaagcgctgcgcacactgcgcagcaagctggaggaatacggtctgtcgcaggacgtgacacggctggaagtggcagacaccgagcagctcgcatttttgtatcaggaccgcatcagcgtgctgctgggtacgctgaacgatctggattataagctggaccgcgcccgctatgtgctgaccaacgccgacggcaagggctgcggccccaccgacaccgggcggctggatttcagccataccagcgccagcagcacacgcaagatctattttgcacagggcgagcctgctttgccctccggctatgtggtgccgcccaaggcagaggaacccgctccggcagaggatgccgccgacagcaccgacagtgcagaaagcacggatactgccgacaccaccgaaccggcggctgaaacggacaccgagcagctgcccctgacccaccctgaccgcatgacggccaacgaagaagaaaaccccatgtaaagaagctctttggaggagactgtatgaagctggaacaactgatggaaggcgtgccctttacccttgtgcagggcagtctggatactgagatcgcagatatcatctacgacagccgcaaggctgccccggggcttttgttcgtgtgtatcgtgggcacccaacgggacagtcacgcgtttgccgccgactgcgccgccaagggaatcagcgcgctggtcatccagcacgacatcgacctttctaccctgcccggggtgaccgtggtcaaggtggagaacagccgctatgccatggcgctgatgagcgccaacctcttcggcaaccctgcccgccagatgaccatgatcggcgttaccggcaccaagggcaagaccactaccacccacatgatcaaaagcgtgctggaggccgcaggccgcaaggtgggcatgatcggcaccaacggcatctactatatgggacgccacaaggacaccgccaacaccaccccggaaagctacgagctgcaaaagaccttccgggagtttctggatgccggctgcgataccgcgctgatggaggtatccagtcagggcctgatgatggaccgcgtggcgggcgtgcactacgatgtgggcgtgttcaccaacctttcgccggatcacatcggccccggcgagcacaagacctttgaggagtaccgcagctggaagggacagctgttcaagcgctgcgatgtgggcgtggtgaatatcgatgacgagaacaccgccgccctgctggaaggccacacctgcaagctggtcacctatggccgcgatgaaaaggccgactaccgcgagaccggctacaaactgctgcgcacccacgattttctgggcgttgccttccacgttaccggcaaggacgagatggacgtcaaggtgaatatgcccggcgagttcagcgtgtacaacgcgctggcagcgctggccgtgggcaaggtgctgggtctgccggatgccgccatccacgatggtctgggcaagtgcgtggtgaagggccgtgtggagctggtgcccatcagcaaaaagttcaccattctgctggattacgcccacaacgaggtatccaccgagagcctgcttaccaccctgcgcgcctacaagccccaccgtctggtggtggtgttcggctgcggcggcaaccgctccaagctgcgccgctacggcatgggcgagatctgcgccaagatggccgatttctccatcctcaccgaggacaacaaccgctttgaaaaggtagaggatattattgcggatatccgcgaaggcatgaacaagggcaacccggacgcaaagttcgtggagatccccgatcgtctggacgcgctgcactacgcagtggatcacgcacaggagggcgatctgatcgccgtcatcggcaaggggcacgagacctaccgcgaccgcgagggcgtcaagacccccttccttgagcgggaactgctggaagagtacgcccagcagatcggactggaataagaaatattattattgcgggaaaggccgctgcacaaagtactgtgcagcggcctttttgcactctgcgggtgcccctatataaaaaggaagcaaactgtgacagaaatgtaaaagataaaaatttttaactaaaaccattgacttatccaacggtttgattataatggtcgtgttcgatacctcataaattttaggtaaataattaaaaacaaacagtgaacataaaggagaatactactatgactttcgaggaaatgaagaagatcgttgtcgataccctgagctgcgatgaggacaaggtgaccatggaggccagcctgaccgaggatctggaggccgacagcctggacgctgtggagctgaacatggcgctggaagaggcctgcggcgtgtccatccccgatgaggagctggcatccctcaagaccgtgggcgatatcttcaactacatcaatgcccatgtctgaggctgaccgaggcgaaacgagatgaacagtatcaaagacctgctgccgggcagcatgcgggagcgcaccttccagctgaaggcccggcgggatgcgggtgccgtgtggaacgacccgcagttcgtggaatgcaaaaagtgcggacgccgcgccacccgccagatctggaacaaggcacagtacgtctgccccaactgcggggtgcacctgcccatcggcgggtactaccgcctgaacctcattcttgataagggcagcttccgggaactggatgccgaccttgccccgcaggatgtgctgcagtttcccggttacccggaaaaactggaagcacagaccggcaagaccggcctgaaggaggctgtcatcaccgccacggggcgcattgagggcaccccggtggtagttgcagtgctggacagccggttctttatgggcagcatgagcaccaccgtgggcgaaaagatcacccgcgccgtggagcacgccaccgcaaagcacctgccgctgatcatcttctcggccagcggcggcgcccggatgcaggagggcattttcagcctgatgcagatggccaagacctctgccgccatcgagcggttctccgcccggggcgggctgtacatcagcgtgctgacccaccccaccaccggcggcgtgactgcaagctttgccagccttggcgatatcatgctggccgagcccggggcgctgatcggttttgcgggcccccgggtcattgaacagaccatcggcgaaaagctgcccgcaggcttccagcgcagcgagttccagtacgagcacggctttgtggacaaggtagtgccccgtaccgagatgcgcgaaacactggcgcagctgctgcgtctgcacgcctgaggagggagcgccttatgatcaaggacatcttacaacagctcgcaccgctggatgaaaagatcgccgccctgcgcggcgacccggcggacgagaacatgaccgatatcaccaaccacgctgccgagctggcagagctttccgcgcaggaggacgctttgctgtccggctgcggggcgttgaccgcagaggacagggtctttctggcacgccacccggagcgcccccacatcgatgagatcgtggatgcactgttcaccgacttctttgagcagtgcggcgaccgtcagtgcaaggaagatgccgccattctgggcggtgtggcgctgttccacggccagccggtcacggtcatcggccaccgcaagggcagcacgctggaggaaaacctgcgctgcaacttcggtatgcccgggccggagggctaccgcaaggccttgcgcctgatgaagcaggccgaaaaatttgaccgtcccatcattaccttcatcgacaccccgggcgcataccccggcaaggacgccgaggagcgcggacagggcgaggccattgcccgcaacctgatggagatgagcggcctgaccgtgccggtgatcgcagtggtcactggcgaaggctcttccggcggcgcactggcgctgggtgtggcaaaccgcatcctcatgctggaaaacgccgtctactcggtgctcagccccgagggctttgccagcatcctgtggaaggattcctcccgcagcggcgaagcctgcgagatcatgaagctgaccgcacaggatctgtacaaggacggcatcgtggaggagatcatcccggagccggtgggcggcgcacagcgcgcccacggggtactgttcggcaatctggacgaggcactgcagcggcagctgcgcagccttgcccgcatgaacggccgtcagctggccgagcagcgctaccagaaattccgtcagatcggagaaatgaggaaagcatgaagggtttgcgtctgatcgctaccggcggggctttgcccggccgcacggtcaccaacgaagagctgagccgcaccgtggacaccagcgacgagtggatcaccacccgcaccggcatccgcactcggcactactgcaccgagggcgaaaacgccgccacactggccattgccgccgcaaagcaggcgctgcagcgcagcggccttgccccggcagatattgcctgctgcgtctgcgccaccctttccgcgccggatgccaccccaagcgtggcctgtcaggtgcaggcggcgctggcactgccggaaaaccgccccgcactggatgtaaacgccgcctgttccggctttttgtacggcacggcggtggcgcgcggcctgctggctacgctgggcgggcggtacgcgctggtcatcggcacagaggcactctcccgcctgatggaccccgccgaccgctccacctgtgtgctgttcggcgatggtgccggtgcggcggtgtttgaactgaccgacacctccgcgccctttgccatcacgctgggtgcccggggcgatgccgccatccatgccggcggcccctgccgcgcaggctcggcacccatcagcatggacggcagggcagtgttccgctttgcggtggatgccctgcccaaatgcctgcacaccgtgctggacgagaccggccttacgctggacgatctggactgggtggtctgccatcaggccaacagccgcatcatcgaccactgcgtcaaggcgctgcacgccgatggtgcaaagttctacaaaaacatggaccgccacggcaacaccagtgctgccagcatcccggtggcgctgaacgagctggctgaaagcggccagctgctccccgggcagacccttgcctgcatcggctttggcggcggcctgacatggggcggcatgatcgtggaatataaaggataaagaccatgaaacttttaaacgagatcctggggacgaaataccccatcattcagggcggcatggccaacattgccaccggcgagttcgccgccgcctgctccaacgccggtgcactgggcatcatcggtgcgggcggcatgaatgccgataccctgcgccagaacatccgccgctgccgagagctgaccgacaagccctttggtgtaaacatcatgctcatgcacccgcaggcagatgagtttgcccagatcgtggtggaggaaaaggtcgccgtggtcaccaccggcgcaggcaacccgggaaaatacgtttccatgtggaaagctgccggcatcaaggtgattccggtggtggctgctgccgtgctggcacggcatctggagccgctgggcattgacgccgtcattgccgagggcaccgagagcggcggccatgtgggcgagatgaccaccatggcgctggtgccgcaggtggtggacgcggtcagcgtgccggtcatcgccgcaggcggcattgccgatggccgtcagctggcggctgcgctggcgctgggcgcttgcggggtgcaggtgggcacctgcctgctggcaagcgaggagtgccccattcaccccaactacaaggccgcgctgctcaaggccggggacagtgacaccatcgtcaccgggcgcaccgtgggtgcaccggtgcgtgtgctgaaaaaccgcatgagccgggagtatgtccgtcaggaaaaggcgggcgcggacaagatggaactggaaaaatacacgctgggcagcctgcgccgcgccgtctttgagggcgacacggtaagcggcagcctgatggccggtcaggtagccggaatgctgcacgaggtgcgccccgtggcggacatccttgccgacctgtggcagggcgggaggcagcgcattgccgcgctgaatgccgaatgctgacccttggcggcaagcccctgcaagtacccattttgcagggcggcatgggcgtaggcgtctcgctgggcgggctggccggtgcggtagcagcctgcggcggcatggggtgcatctccaccgccgatgcaggctaccgcgagccggattttgcccgtgacccggcggcagccaaccaccgcgccctgaccgcagagatccaaaaggctaaggccattgccgggggcatgggtctggtagctatcaacgccatggtagccacccgggactatgccgaggctatccgcaccgccgtagcggcgggagtggatgccgtggtctccggtgcgggtctgccgctggagctgccgggcattgtgggcaccaaagaggtagccattgcgcccatcgtatccagcgcccgggcggcaaagctcatcctgcgccgctgggcaaagggctttgaccgcaccgccgattttgtggtcatcgagggctgcaaggcgggcgggcatctcggctttgccgaggaggacctgctggccgaccgctgccagactttggacgagattctgcccggggtgctggccgaggtaaaaccctacgaggaacaatacggccacgccatcccggtatttgtggcgggcggcgtgtacaccggtgccgacatggcacactttacaaagcttggcgctgcgggcgtgcagctggccacccgctttatccccacctacgagtgcgacgcctcccagacctacaaagacgtgctgctggcggcaaagccggaggatgtgcgcatcatccacagcccggtgggaatgcccggccgcgcgctgaacaccccgctggtgcaggcgctggccgagggcaaacgcttcccgcccaagcactgcgcccggtgtctcaagacctgtgaccccgccgccgtgccctactgcatcacccacgccctcatcgaggcggtgaagggcaacgtggaggaagggctcttcttctgcggcgaaaacgtgggcaggctggaccggatgcgcaccgtgcgcgagctgatggacgaacttgtgaccgaatggaggcagaatttatgaagcttgccgtactttacgccggtcagggtgcgcagcaccccggcatgggcaaggaattttacgaagcatctcccgccttccgggcggcctttgacagcgcagcgctggattttgatctgcaccgcgtctgctttgaggacccggacggcgttttgaaccagaccgaatacacccagccctgcatggtggcctttgcctgcggcgtgaccgctgtgctggcggaaaagggtgtaaagcccgcctatctggcggggctttcgctgggcgaatactccgcgctgcaggcagccggggtgttcaccgcaaagcaggccatcgagctgaccgccttccggggcaaggccatggccgaagctgcaaaggggcttgcctgcggcatgaccgccgtgctggggctggacagagaaaaactgtctgcttgctgcgaacaggctgcagagacgggctgtgtgcagatctgcaactacaactgccctgggcagctggtcattggcggcgagaaagccgctgtggagcaggccgccgcgctggcaaaggaagccggtgcccgccgctgcatcccgctgaaggtcagcggccccttccacacaaagctgatggctcccgcaggggatgcgctggcacagcgctttgcgggcgagaacttcggcaccatggagacgccggtgctgttcaactgtctggggcatgaaaaggccgagaccgacagcatcccgcagctgctggtaaagcaggtgcagagcagcgtctacatggaggacactttgcgccgcttgggtgagctgggtgtggaccacattctggaagtcggccccggcaacgccctgagcggttttgtgaaaaagaccctgcccggggtggtctgcaccgcagtggagaccccggaacagctggatgcggtgctgaccgcatggaaggatgcagaatgagtgaagaaaagctgacccgcgccgccattgttaccggcggcagccggggcattggccgcgcagtgtgcgtggcactggcaaagcagggctgcaatgtggtggtgaactactgccacggcgcagagcctgcggagcagacggcagcgctctgccgcgccgagggcgtgcaggcggtgaccgtgcaggcggatgtatccaccgccgagggctgcaaggcactgttcgatgccgccgccgaggcctttggccgggtggatgtgctggtgaacaacgcgggcatcacccgggacaacctgatcttgcgcctgaccgagcaggattttgacgcggtgctggacaccaacctgaaaagcgcctttctctgctgcaaggaagctgcccgccgcatggtgcgccagcgctatggccgcatcgtgaacctttccagcgtggtggcgctgcgcggcaacgccggtcagaccaactacgccgccagcaaggcggggctcatcggtctgaccaagagccttgcccgggagctggccgcgcggaacgtgaccgtgaacgcggtagcgcccggctttatcgacaccgacatgactgccgtgctgccggaggcggtgcgcaccggcatgacgcagggcatccccgcgggccgcgcaggccagccggaggatgtggcacaggcagtggcgttttttgccgcagaacaaagcagctatctcaccgggcaggtgctctgtgtggacggcggcatggcaatgtaaaggagaacccttatggaaaaacgcagagttgtgatcaccggccttggcacggtgaacccgctgggcaacaatgtggcggacagctgggcggcagcccgtgccggtaaatgcggcatcggccccattacccagttcgacaccaccgacttcaagtgcaagctggccggtgaggtaaaggattttgaccccgagagcgtggtggacaaaaaggaagtccgcaaaatggcgcgcttcaccctgctggcactgggcgctgccgccgaagccattgcagacagcggccttgataccgaggccgagggcaaggacatcggtgtcatcctgtccagcggcatcggcggtctgcccacgatcgaggagcagcacgcccgcggcgaggaaaagggcatggagaaggtaagcccctactttgtgcccatggccattgccaacatggcagcggcgcaggtggccatccgcttcggtctgaagggcatgtgcacctgcccggtcacggcctgtgccggcggcaccaatgccgtaggcgacgccttccaccgcatccgggacggctacgagccggtgatggtctgcggcggtgcggagagctgcatcagccccttgggcatcggcggctttaccagcatgaaggcgctttccaccgccaccgacccggatgctgccagcctgccctttgacgcccgccgcggcggctttgtcatgggcgagggcagcggtgtgctggtgctggaagaactggagcacgcaagagcgcgcggcgcacacatctacgccgaggtggtgggctacggtgccaactgcgacgcctatcactttaccgctccggctcccggcggcgcaggtgccatcgactgcatgaagctgaccttggtggatgccgacatcgcaccggagcaggtggatcacatcaacgcccacggcaccggcacccacatgaacgatgcctgcgagactgccgccatccacgccgtgttcggcgcacacgccaaggagatgaccgtggtcagcaccaagagcatgaccggccatctgctgggcggcgcgggcggcatcgaggccgtattcaccgcgctggcgctgcgggatcagtttgcaccgcccaccatccactacgcccagcccgacccggagtgcgatctggactatgtgcccaacaccgggcggcagcaggagatgcagtatgcactgagcaacagcttgggctttggcggccacaacgcctgcatcgccctgcgcagatgggagggctgacccatggcagagcctcgtaccgtgcgtgaaaacgccaacaccctgagcagtgtgcagatcgcggagatcctgccccaccgatacccctttgccctcgtggaccgtgttctggactacgagccggggcagtgggccatcggccgcaagtgcgtcacccgcaacgaggaatttttcaacggccacttcccggcacagccggtcatgcccggcgtgctgctgctggaagcactggcacagaccggcgctgtggcggcgctgagcctgccggaaaacaagggcaagcttgcgctgttcggcggtatcaagagtgcccgcttccgcaaacaggtcacccccggggacgtgctcaccctccactgcgagctggtgcagcagcacggcgctgtgggcgtaggcaaggcctcggcatgggtggacggcaagtgcgccgtcaccgcagagctgacctttgtgctgaccgacgcagcagaataaaatgaatgcaaaaagagataggcgatccctttcgggaaagcctatctcttttttgtgtctgttccggtcggtttactctgcggcagctgtcccggcgtctgcttcagcagtgggggcagactctgccgtggcggtttctgttggggcggtcgctgcctgttccttctccatccactcccgcacgcggtcggggcggttggtgatgtaggcatcggcgctggtgcgcagcaggctgcggacggaatcttccgtgtccaccgtccacaaagacaccttgatgcccatcttgtgcagtttgtcaatgaaaccagcgtttttgtaggcggtgtggtactcacagctgacccactccggcacaaagtccagactgcggatgtaggcgggcagatcccgctgcgccatcaggtttttgtagatctcgttcaggctctcgccgggaaagtttgcccgcagcatacttaccttatcgctcatccagcgggtcatccagctgcaattttcctcgtcggctgcgctctccggcagggcagcgtccatggcttccatgtcgtctatgccgttggtcagtccaagatccttccagatgatgggcggcggcagcagcatgctttccagctcgccgtataccagtgcacctacccgcagttcgggcagcagctgctttgcctgccgcagcagcgcgtggttgaaggaaacaaggatcacctgttctaccatctcggtctgctgcagcacttccagcacccggggtacaaagtccgggtcgttgtccatggtggatttcagttccagatgcacggtgcatcccggcatctgcctgcacagttccatggcctcctgcagggtggcgatcttctcgtcctgaaagatggcgcctttccagctgccgaaatccagttcctttaaatcgcccatggtcatatcgtagatcttgccggaaatatccgtgtgcagatcgatcatatagtcgtggtggatcacaagcccggcgtcaatggtctgctgtacgtccatctctacgccgtctgcgccaatctccatggcttttttaaaggcagtcagggtgttttccggtgcaagataggaagcaccgcggtgtgcaatgatttgtggtgtcataaattttctccgttatcggttcttcctcacacttttacgccccggcgctgccataccgcaaacagtgccggggcgcttgctcaggtcaggtcctcgccgtctgaagcgatgacctttttataccagtaaaaactgtccttccggctgcgggcaagggtgccgttgccgtcgttgtccttgtccacatagataaagccgtaccgctttttcatctcgccggtggaggcgctcacaaggtcgatgggaccccatgtggtgtagcccatcaggggcagaccgtcctcgttgatggccttttccatctcttcgatgtgtgcccgcaggtagtcgatgcggtagctgtcgtggatggagccgtccggctctacggtatccaccgcacccagaccgttctccacgatgaacatgggcttttcgtaccggtcgtagatggtgttcagggtcacccgcagacccaccgggtcgatggcccagccccactcactggctttcaggtaggggttcttcaccgatgccgacacggcgttgccttccgcattctctgccgccatcagctccttatccaccgtgatgcagcggctggaatagtagctgaaggacacaaaatccaccgtgccctcccgcagcgtgcggtcgtcctccggctgtgtgtgcagctgcaccccggcgcgctccatccgctttttagcccacacggggtaagcaccgcgcacctgtacatcggtaaagaagtagttgtcccggtctgcctcctgcgccgcccgcacatcctccggggcgcaggtgcgggggtagaactgccctgccgccagcatacagcccaccatggcgtccggcattttttcgtgcgccagctttaccgcctttgcgctggccaccagctcgtgatgggcggcctgatacttgacctgctccacattctcgccggggtggaataccagcccggcgccggtaaaggacaggtgcagcagcatgttgatctcattaaaggtgagccagtacttcaccttgcctttgaagcggtcgaacagcacctcgcagtagtggacataggcgtccaccatgcggcggtctttccagccgccgtattttttgatgagggcaatgggagtgtcaaagtggcagatggtgaccagtggctcgatgccgtacttatggcactcgtcaaaaatgctgtcgtagaaagccagtcctgcctcgttgggctgagcgtcatcgccgttgggcaggatgcgggtccatgcaatggacagccggaagcacttgaagcccatctctgcaaacagggcgatatcctctttataatggtgatacaggtcaatggcctcgtggctggggtagaaatgtgcgtcatcgcagcccagcatttccatatagcccgttgccaccggaaaacggtccgggccgaagggggtcacgtccaccgttgccagacccttgccatctgcctgccatgcaccctcgcactggttggcagcggtagcgccgccccacaaaaagcccttgggaaatttgcccatactctttacctccttgtttacttttgcgcccctgcggagcgcagatatacgcatactactatgataccgcaactggcggcgcttgtccatgactgcattttgcaaaggtgcgtgcatttggggataaagtacgacttttatcgtcaaaacgccgaaatttcctgctgttttttgcgcacttttcacgataaaaacacaaaacttgcccgtttttcttttattctgttccttttaaaccgcgcggcagtatggtagaatagtagggtaagaactgcgctgcgctgctgcgctgctgagaacatggaaaaatggagtgtttgattatgactgagttcaaacccatcaaagaaggcaaagtccgcgagatctacgacaatggcgacagcctgatcatggttgccaccgaccgcatttctgcgtttgacgtcatcctgaaaaacaaggtcaccaaaaagggcaccgtgctcacccagatgagcaagttctggttcgattacacccgcgatctgctgcccaaccacatgctgagcgtggatgtgcaggatatgccggagttcttccgccagccccagttcaccggcaacagcatgatgtgccgcaagctgaccatgctgcccatcgagtgcatcgtgcgcggctacattaccggcagcggctgggcaagctaccagaagaccggcaaggtgtgcggcatccagctgcccgagggcctgcaggagtccgataagctgcccgagcccatctacaccccctccaccaaggcagagatcggtgaccacgacgagaacatctcctacgagcagagcatcgacgtgctggagaagcagttccccggccacggtctggagtacgccaccaagctgcgggactacaccattgccctgtacaagaagtgcgccgagtatgcactgtcccgcggcatcatcattgccgataccaagttcgagtttggtctggacgaggacggcaacgtggtgctgggcgacgagatgctgaccccggactcctcccgcttctggccgctggagggctacgagccgggtcacagccagccctccttcgacaagcagttcgtgcgcgactggctgaaggccaaccccgacagcaactacgacctgccgcaggatgtcattgacaagaccattgccaagtatctggaggcctatgagctgctgaccggcaaaaagctgtaagcgtatcccgtatccataaaaaccaaggctgctgcggaaaattttccgcagcggccttttttgcgccccgccccttgacattgagtggggatgtgagtaatatatgtatcgtatcaaacagtttcacatcgaacaacttgaatagaggaaaccattatgtgtacacagcaccctattgaagagccctgcaagctggacccgccgtgggaagggccgcaggtcatccccgcccagctgcaccgggtggataacctgatcttccgcaggctgaaccagttttcccgcgccaacggggtagagcagaccactcccatgcacgggtggatcatcgagtatctctaccgccaccgggacgagccggtgttccagcgggacatcgagcgggagttttccatcacccgctccacggtgacgaacattttgcagctgatggagcgcaagggctacatccagcggctgagcgtgccgcaggatgcccggctcaagcagctggttttgaccgaggagggcatccaacggcacgaaaagaccctgctgtccttccaccagaccgacgactatgtggccggactgctgactgaggaggagaacgcagaactgctgcggctgctgaacaagctgcgggaagcactgaaataacgatcttttccgtcaaagcgccgaaaaaggacttgttaaattagcaattatgaacatttttcgaaagctattgacatttaaattgttttgtaccaaacaaataaaattaacaggagggaactcagatgatcaaaaagcttgtgtcgcatctgggcgagtataaagccgcctcgatcaagacaccgctctttgctgcgctggaagccattatggatgtgctgctgcccaccatcatggcctttatcatcgatcagggcattgaaaagggcgatatgaacgccatcctcaagtacggcctgctcacctttctggtggctgtggtcgcgctggcgctgggcgttctggccggcaaatacgccgccgaggcatccaccggctttgccggaaatctgcgcgatgccatgtatgaaaatatccagcattattcttttcccaacatcgacaaattctctacggcaggtcttgtcacccgcatgaccaccgacgtgaccaacgtgcagaacgccttccagatgatcctgcgcatgtgcgtgcgcgccccggtgcatctggtgtttgcaatgttcatggctgtggtcatcggcggcccgctgtcgctggtgttcgtggtggcggtggcctttctggtggcggtgctggctgccatcatgatccctaccttccacatctttgaccgtgtgttcaagaactacgataacctcaacgcctcggtgcaggagaatgtctctgccatccgcgtggtcaagagctttgtgcgcgagggctttgaaaacgaaaaatacaccgctgcctgcgagagcctgtacaagcagttcgtcaacgcggaaagccgcctgagcttcaataaccccgccatgctggtggcggtgtacggctgcaacatcgcgctgagctggttcggcgcaaaatatgtgctgcacggtgccattaccaccggccagctgaacgccctgttcggctatatcatgaacatccttatggcactgatgatgctgagcacggcctttgtcatgatcgccatgtccgccgcctctgccaagcgtatcgtggaggtgctggacgagcacaccgacctgcccccggcaaagcagccggtgcagcaggtggcagacggcagcatccagtttgaccacgttaccttcaagtataagcacggcagcggccagccggtgctgaacgatatcagctttaccatccggcccggcgagacgctgggcatcatcggcggcaccggcagtgcaaagtccagtctggtgcagctgatcccccgcctgtacgatgccgagagcggcaccgtgcgggtaggcggcgtggacgtgcgggattataaccttgacgtgctgcgccgcgaggtctccatggtgctgcagaagaacgtgctgttcagcggtactattctggataacctgcgctggggcgatgccaacgccaccgaggaagagtgcatccgcatggcaaaactggcctgcgcggatgagttcatccagcgcttcccggataagtacaatacatggatcgagcagggcggctccaacgtgtccggcggccagaagcagcgcctgaccatcgcccgcgccctgctgcgcaagcccaaggtgctgattttggacgactccaccagtgccgtggataccgcgaccgatgccaagatccgcaaggccttccgggaggagatccccggcacgaccaagatcattattgcacagcgtatttcctcggtgcaggatgcagaccgcattctggtgctggagaacggtcagatcaacggtctgggtacccacgcagagctgctggcgaccaatgccatctatcaggaggtctacaacagccagacgcagggcggcggcgattttgacaagcagggaggtgcgcagtaatggcagtaaaagaagtacatggccccggcccgcggggcgcacgggggccgcgccccaaggtggaaaacccgggcaagctgctgaagcgcattatggatgaggtgttccgcaactatctgccccactgcatccttgtgcttgtctgcatcgtggtcagcgcgctggccaatgtgcaggccagcctgttcttgcagaccttgatggacgattacatcgtgcccatgacccgccagcagaaccccagctttgcaccactggccggtgcattggcgcggatgtgctgcatctaccttgtgggcattctggctgcatgggccaacgcccgcatcatggtcaacgtaacgcagggcacgctgcgcaatctgcgcaccaagctgttcacccacatggaaagcctgcccatccggtattttgacacccatccccacggcgatatcatgtccgtgtacaccaacgatgtggataccctgcgccagatgctcagccagagcatcccgcagctggtgtccagcgtcatcacgatcgtatcggtgttcttcagtatgtgcatgctcagctggcagctgaccatcgttaccatgctcatggtggcgctgatgctgttctgctccaagcagatcgcaaaaagctcctccaagtacttcatccagcagcagcgggatctgggcaaggtgaacggctacatcgaggagatgatggaaggccagaaggtggtcaaggtgttcactcacgagcagcagacccttgccggcttccgtgagttgaacgaccagctgaaggaaagcgccaagcaggccaacgccttctccaacatcatgatgccggtcaacgcccagctgggcaacatcagctacgccatctgcgcgctggttggtgcagccatggccgtgggcggtgttggcagcatgacccttggcaccgtggtggccttcctcagcctgaacaagggcttcaatatgcccatcagtcaggtgtccatgcaggccaacagcgtcatcatggcactggccggtgccgagcgcatcttcaagatgatggacgagcccagcgagaccgacgagggctatgtgacgctggtaaatgccaagtacgaccgcaatgaccagctggtggaaactgccgagcgcaccggcctgtgggcgtggaagcacccccaccacgatggcaccgttacctaccacaagctggcgggcgatatcacctttacggacgtggactttggctatgtgccggaaaagacggtgctgcatgacatcaacctgtacggccgtccggggcagaagatcgcctttgtcggctccaccggtgcaggcaagactaccattaccaacctgatcaaccgcttctacgatattcaggatggcaagattcgctatgacggcatcaacatccacaagatcaaaaaggccgacctgcgccgctcgctgggcatcgtgctgcaggacacccacctgttcaccggcacggtgatggagaacatccgctacggacggctggaggccaccgatgaagagtgcatcgccgccgcccgtctggccaacgcagatggctttatcaagcgtctgccggagggctacaacaccatgctgaccggcgatggtgccaacctctcgcagggacagcgccagctgctggccattgcccgcgcagccgtggcagacccgccggtgctgatcctggacgaggcgacctcctccattgatacccgcaccgaggcgctggtgcagcgcggcatggacggcctgatgtacggccgcaccagctttgtcattgcgcaccgcctgtccaccgtccgcaatgcagactgcatcgtggtgctggagcagggccgcatcatcgagcgcggcagccacgacgagctgatcgccaaaaagggcaagtattaccagctttataccggtaatctggccgagaactaaacaatttcccaccttctcacaaagccgccgcacagccatgccgccgtgcggcggctctttttttactcccatgaagaagcaattctggaaaatccgcagattttccagaattgcaaatataaaaataattttccgctgaagatggccaaagcgcacgcggcggccattcaaaatcgtccgctccacggtatacaaatgccccgggctgtgctagaatggagcaaacgagaaaaaggctggtgagtgtatgcaccctctgacggaatatccccgcccggccatgcgccgggacagctacgagaacctgaacggcctgtggcagtacgccatcaccgcctcggcacagcgcccggcgggctgggatggtgagatcttagtgccctacgcgccggagtgccgcgcctccggggtggggcgcacattgcagcccgggcagtggctgcactaccaccgatattttgcgccgcccgccgggacgggcggcagggtgctgctgcatttcggtgcagtggactacgcctgcgccgtgcaggtgaacggccatctggtgggcggccaccggggcggctactggccctttacgctggatatcaccgcgcagctcaacggcacaggccgcaacagcctgtgggtggcggtgcaggaccccaccggccacggcacacaggcgcggggcaagcagactttgcagcccggcgggatgttctatcccgcccagagcggcatctggcagacggtctggctggagcgcgtgccggaaaattacatccagtctctcaccgttacgccggactatgatgcccgcaccgtgaccgtgaaagcccatacctctgcacccggcggcgcggcgaacctgtgggcggtggtgcgtgccgggggcgtgaccattgccgaggactggggcggtgatgaggccgaccaagacggtgaggtgacgctgcatattgcggacgagtatttcttcccgtggagcccggacacgccctttttgtacgacctgaccgtgggcactacgcagggagaggaagagcagttcgacaccgtgcacagctactttgccctgcgcaagtggagctgcgcaccggacgcaaggggcgtgctgcgcttctgcctgaacgacaagcctatcctgctcaacggtctgctggatcagggctactggccggagggattgtacaccccgccctcggatgcggcggtggaacgggagctgagcgaggtaaaggcgctgggctacaacctgctgcgcaagcacgcaa

SEQ ID NO: 1131 - DNA, 13645 bp, unidentified
  source 1..13645: mol_type = unassigned DNA
atgttcaacaaacaccctaaaggtctgattgccgcatcctttgctaatttgggcgagcgtttcggcttttataccatgatggccattcttgtactttttctgcaagccaagttcggactggatggaaaagaggcaggtttgatctactcaacattttatttttctatttacattcttgcattgataggtggtattattgccgacagaacccgtaattacaaaggtaccatctttactggcattgtcttgatggcggtaggctacttgatgcttgccatcccgtctcctacaccggttgccaataaaaccttgtttttggtgattacttgtgcggccttgtttgtcattgctttcggaaatggtcttttcaagggaaatcttcaagcgctggtagggcagatgtacgacaatccccaatattccagcatgcgtgattctggtttctccttattctatatgttcatcaatgtaggtgccatctttgctccgtttgccgcagtaggcgtacgtaactggtggctgtccacattcggctacaattatgatgccgacctgcctgccctttgccacggacatctggcaggaacgctgactcccgaagctgtggacacttatagtgcactggcaacgaaagccactatttccggaacacccgtaacggatatgacggtatttgccaatgaatatctgaacgtgtttaccaccggtttccattatgcattcggtgtagctatcttggctatggttctttctttggtaattttcgtcattaacagaaagaaattccccgatcccagcaagaaggttgctgcaaaagcgggcgatgccactgcagtggagatgaatgcacaagaggtaagacagcgcatgtatgcattgtttgccgtattcggtgtggtaattttcttctggttctcgttccatcagaatggattgacactgacttattttgccaaggaatatacagatttgaatttgttcggcatggctatttcagctgagctgttccagtctttgaacccgattttcgttgtgtctctcactccggtcatcatggctgtctttgcagcacagcgtgccaagggtaaagagccttccactccgcggaagattgccatcggtatgggtattgctgccaccggcttccttataatggctatcggttcttatgtaagcaacttgccgatgcacaaggatattatcgctttgggtacctctccggtgaaggtgactccgctgttgctgatggttacctatctgatattgactgttgccgaattgtacatttctccgttgggcatttcattcgtatccaaggtggctcctcccaaatatcagggtatcatgcagggcggttggctcggtgctactgccattggtaatcagttgctcgttatcggtgctatcctctacgaaagtattcctatctggatgacgtggacggtatttgtagtagcgtgctgcatttccatgttcaccatgctgttcatgctgaaatggcttgaaaaggtggcgaagtaatcggaaacgaaagataaaactaaaggctgcgcaatgttcgtaatgaactgcgcagcctttagtttttggagggcttttaatgccgggactcagatttccagtcccatgatgtagtcattcatgtaatatccgtttcctatcgggaaatccccttcacggagttttcgcattcccatatgttcgtaaaactgcagtgccttgttgttgcggtttacattcaattccatcagacaaaggccgggatgtacttccttgatgtacttgatggcttctcgaaagaggaaactgccgcaatgtgcaccctggtaataggggagcacataaatcttttgcaggtggaataaatcttctccttgctgctgtacggacacatagcccgccgcttcacattcttcgtaggccaggaagtagacgtggccttcctcttccatttgcttgcggatattgtccaatgaatacatccattccatcatgtagtcggtctgttcgggagtaaggatatccttatacgtgacggggaatatttgctgcgcaagtttctgaatcagtgcgcagtctgctgtcgttgcttttcttatggtaaacatatcggttgtatttatactgtttggggtgtaaagttaagccttttttgtgaaacaatcgttatctttgcagaccgttaccgaactaactaattttgattttaaaaattatggcatttacgagcaacattatgattgtccgccacagattactgaaggaactggtaaagctgtggaataacaacgaacttgtggataaaatagaccggctgcccatcgagctgagtccgaagaggtccaagcacgcgggacgctgctgtgtgcacaaagagcgcgcggtgtggaagtacaagtcattgccgcttctgggactcgatatggaggacgagacggatgagctgacccccttgtcggagtacgctgcccgtgcactggacagagcggaaaatggcaggccgaaagacaacatcatgtgtgtgattgacgaagcttgttcggcatgtgtgcagattaactacgagattacgaacctctgccgcggatgtacggcacgcagttgccaggtgaattgtcccaagaaggcagtgcacgtcaaggagagcggtcaggcatggattgaccatgatgcatgtatcagttgcggcatctgccataagagttgtccctaccatgccattgtttatattcccgtaccttgtgaggaagcttgtcccgtgaaagccatcagtaaggatgagaaggggatagagcatattgacgaaagcaaatgtatctattgcggaaagtgtctcaatgcatgtccattcggagcaattttcgaaatatcgcaggtgttcgacgtgttgcacagaatccgcaagggtgagcaggtggtggctatcgtggctccgtccatcctggggcagttcaagacgactattgaacaagtatatggcgcattgaaacaagtcggttttacggatgtcattgaggtggctcagggtgcgatggataccgtcagcaacgaggcgcacgagctgattgagaagctggaggagggtcagaagtttatgacgacttcctgttgtccgtcttatatagagttggtgaacaagcatattcctgccatgaagccttacgtgtcgggcaccggttcgccaatgtattatgctgcccgcattgctaaagagaagtatccggatgcgaaggtggtcttcataggtccttgcgttgccaagcgcaaagaggcgcagcgcgacgaggcggtggactttatcatgactttcgaggaggtggcttccgtgcttgccgggctggatattcagatggagcaggcaaagccctattccatgagtttcacttctgtgcgcgaggcgcatggttttgcgcaggcaggaggcgtgatgggtgccgtgaaagcctatctgaaggaagaggcagataaaatcaatgccgtacaagtggctaatctggataagaaggctatcggtgcgttgcgtgcttatgccaagtcgggcaaggctccggggcaatttattgaagtgatggcttgcgagggcggttgtattaccgggccatgttcgcataatgaaataactgccggaaagcgccagctgacgcaggagttggcaaagagaaaagagacatattagccctttgtccgtttatatgaagcatttgattgacaaactgcggagcaatcgcaggctggatgccgaagagtataaagccttgcttctttgtcgggacacagcccttgcagcctacctgcaagggcttgcccgggaagaagcgcttgctcgctttggcaataaaatcttcattcgcggactgattgagataaccaaccgttgccgcaataactgctactattgcggcatacggaaggagaaccggaacatagtccgttatgagctggcgcaggaggagattctttcgtgttgccatgaaggctatcggttgggcttccgtacctttgtgctgcaagggggcgaagcgccggcggtgaaggatgaggggatggtggagacagttgccgccatccggcaatccttcccggattgtgccattaccttatctttgggcgaaaaatcgcgggaagcctacgaacgtttcttcctggcaggtgccaaccgctatctgttgcggcacgaaacctgcaacgaagggcattatcaccggcttcatcctgctgagatgtccctttcccatcggttgcaatgcttggactggctgaaagagataggctatcaagtgggaaccggaatcatggtaggcagtccttaccagacggtggaccatctggtagaagatattctcttcatcgaacggtttcagccggagatgataggcatgggaccttttcttccgcatcacgatactccgtttgcctcttttccgccgggagatatggagttgacgctgaagttgctttctatcttccggctgatgcatcccgtggcactgatacctgctaccactgccctggccacacttgctccggacggacgggaacggggaatattggctggcgccaatgtcgtgatgcctaatctttcgccttctcatcagcggacgaagtactccctttatgataacaaagcttctgcgggtgccgaagcggcagaaggtttgcaaaaattggaggaacaactaaaagggataggctacgaggtatcaaaagagagaggagattatgagaatggagaattgaccgttgataattgataattttcaaatcttcattctttattttaattaccaattgtcaatttacgaagtgtataacataaagtcaagacaagcagaagaattcatcaatcaccaggagatattggatacattggagtatgcgcaggtaaaccgcaacaaccgtccgctcatcgaaagtttgattgacaaggctgctttgtgccagggactttcccatcgggaggcggccctgctgctggaatgtgacgagccggaactggtgcagcgcatctatcatctggcacgtgaaatcaaacggaaattctatggcaaccgcattgtgatgtttgccccgctttacctttccaactattgcgtgaacggttgcgtctattgcccgtatcatgccaagaaccgtaccatcccccgcaagaaactctcgcaagaggagatacgccgcgaggttatcgccttgcaggacatgggacataaacgcctggcgctggaagccggagaagaccctcgaaacaatcctatcgactatatcttagagtccatccgcaccatctacagcatccaccacaagaacggggccatccgccgggtgaatgtcaacatagccgccactacagtggaaaactatcggttgctgaaagaggcaggtatcggcacttatatcctttttcaggagacttacagcaaagagcattacgaagccttgcatcccacgggaccgaaaagtaattatgcctaccacaccgaagcgatggaccgcgctatggagggtggcatcgacgatgtaggtatcggtgtattgtttggtctgaatacctatcgctacgacttcgtaggattgctgatgcatgccgaacatctggaagctacctttggcgtgggtccgcataccatcagcgtaccgcgcatttgtccggcagatgatatttcgaccgaggattttcccgatgccatctcggatgagatgttctgccgtattgtggcggttacccgcattgcggtgccttatacgggaatgattatttccacccgtgagtcggaagccgtacgccgtcgggtgctcgaactgggcgtttcgcagataagcggcggttcgcgcaccagcgtgggaggctatgccgtgccggaagccaaagaggaagattcctcccaattcgatgtgagcgaccggcgcacgctggatgaagtggtgagttggctgctcgacctggggcatatccccagcttctgcaccgcctgctatcgcgagggacgtaccggagaccgcttcatgtcgctcgtcaagcgcggacagatagcaaactgctgccagcccaatgcactgatgacattaaaagaatatctggaggactatgcctcctccgaaactaaggagaagggcatacagctgattcgtgaggagatggagcatatcccgaaccccaagatacgggcgatagccgaacgtaatcttcaggagataggggaggggaaaagagactttagattttagatttcggatttatgaataatacacctcgttccaaccgcctgcacattgccgtctttggacgacggaacagcggaaagtccagccttgtcaatgccttgaccgggcaagacacggcattggtatccgcaacgcccggcactactaccgatcccgtaaccaaagccatggaagtatatcctttgggcccgtgcctctttatcgatacccccggttttgatgacgacgaaggcgaactgggcggtatgcgcgtggagcgtaccttaaagacggtggagaaagcagacatcgccctcttgctttatgaagctgacggaacgctggaacagcaatggctaaagctgctggcagcgcgcgaaatccccgtgatactgatactgaataaagccgattcccgtcaagacaccgcttccgtggttcttcggattgaaaaggagtgcgggcaggctcccgttgtggtcagtgccaaagagggtaccggcattcaaggcattttcgatgctatcctcgaaaagcttcccgagaattttggtgagcagactatcacgggcaatttggtaagtgaaggagatgtcgtcctgctggtgatgccccaggatatacaagcccccaaaggtcgtctcattcttccgcaagtgcagaccatccgcgaactgttggataaaaagtgcttagtgatgagctgcaccaccgacaagctgcaagcctccctgcaagcccttgtccgtccgcctaagctgataatcacagactctcaggtgttccccatcgtctatcaacaaaagcctgccgagagtagtcttacttccttctcggttctttttgccggttacaaaggagacatcaatgcctttgtagagggagctgccgctattcatagcctgacaccccaatcgcgtgtactgatagccgaagcctgcacccacgccccgctgaccgaggacatcggcaccgtcaaaattccccgcctgttacgaaagcgcatcggcgaggaattgcagatagactttgtatctggaaatgactttcccaaagacttgttccgatatgatttaattatccattgcggcgcttgcatgttcaaccggaagtacgttctcaatcgtatagcccatgcccacgcacagcacatccccataaccaactacggagtagcaattgcgagtctgaccggtatattggataaaattgttatccatcggtaaatatccctcttcctctctgttcacgttactgatgttatagagtagcgtgaactacttttcttgttaataatgtttaatataaagtactttgtaatgcaaggtactggtataatacatatatttgtgccatacaaggaacaacaatagaatgaataaggacactcattactctattgcgcagccaaatagtaaatcgtaaattgtcaaatagtaaatactattatggatgtaaacaatgtaaagtcgcaaatgcgcaagggcatgcttgaatattgcatcatgctgctgcttcacaaagagccggcttatgcttcggatatcattcagaagttgaaagaagccagactgattgtggtggaaggtacactttatccgttgctcactcgtttgaagaacgacgaccttttggggtatgaatggattgagtctacacaaggtcctccccgtaaatattaccggttgacggaaaaaggagaagtctttctcggtgaactggaaacatcctggaaagagttgaacgagacggtgaatcacattagcaattcttgaaatgaccacagagaatatgctgcattcgccgaatggtaaatagtaaatcgtaaatagtcaaattgtaaataaatagtgtgttatgaaaaagacattaactgtaaatttaggtggaaccgtttttaatattgatgatgacgcataccgccttttggataattatctgagtaatctcaagatacacttccgtaaggaagccggtgccgacgagattgtagatgatatagaacgccgcatttccgaactctttgccgagaaattgtcggccggttcgcaagtaatcacgatagccgatgtggaagaggtgattgcccgcatgggaaagccggaagatatggaggcggaaggagagagtgctagtgccgattccggcagcacgagtgccgggggcggctatggtgccggtgcttggaacagcaataccgcttatggcactacacgccgtcgtctataccgcaatccggatgacaaaatgctgggtggtgtcatcagtggaatggctgcctacctgggatgggatgtaactttacttcgactgttactgcttgtcatcttgatttgtggggtagggacattgataccggtctatatcgtgtgttggctggttataccggaagcccgcacagcagccgagaagttgagtatgcgtggcgaggccgttacggtagagaatatcggaaagacggtgacggacggttttgagaaggttgccaatggggtgaatgattatatgaggtcggacaaaccccgtactttcttgcagaagttgggagatgcattggtgatgattgtcggctggttcttgaaaatctgtctggtgatatttgccattatctgcagtccggtactgtttgtatttggagtggtatttgtggcgttgttgtttgctgcgatagcggtggctgttggtggtggtgcagctctcatttcccttttcccgatggctgatgtggtactgcctacttctccgctgtctgccattgtgatgtacattgcaggtatcttgttggtaggaattcctttggtcagccttgtgtgggccatctttagccagatattcaagtggcagccgatgaactccggtttgaagtggacgctggttatcctttggattgtaagtgcggcttgcttcggaatctgttttgcagtgcaaggggctactttcccggaattgggtatatttaacttctgagaatagtaatttcttttttaattgatatcgtgtttgtggaaatctgatttctataaacacgatattttttatttggttgtaattggttgttatacagtgaaatattgcgtttggaaaaggcgttttttaaacgttcgtttaatgaacgcaaagataacgtgtatttttgaatctcgcaaaatgtttaataaaaatattctataaatttctttttagtgagtataatactttgtcagtaagcctgttgcattgtatttctctaacttcttccttttactaatttttaagtaatcttccctctttaattttcttaaatattgacgttcaaaaaacgaacgtctattgaacgctttttgcttgcaatagattcgtttacagcattttacctgttaggtaatgaatgactgcaaaaaatctgttgacaagaagggcataaagcttgtcgtattctacataaagtgtccgcaagtgattgaattccaagtgtatgcaaggaatttaaagccccaggagaacacccttgtctgaacaaaagcataaaaatgggaatagagaaagaggtcgaaatctggtatgctatgcgtgccacctaccgcagagaaccggatgccatgcatctgctcaagaaagaaaatttgggctgtttcattcctatgcaatacaagatatgtataaaaaaagggaaaaaagtccgtgctctggttccggtcgttcataatctgctttttgtccatgcccgtccttccgatgtgcagcgcgtaaaatctcaagtcacttatctgcaatatattaccgatacccgcagtgggcagaagattattgtccccgacagtcagatgcagcgtttcattgccgtatccggcacttacgatgaccatcttctttattttcaaccggatgaattgaacttgtccaaaggtaccaaagtccggattaccggcggtgaatttgaggggcaagagggtatatttctgaaggtgaaaggcgcacgtgaccgtcgcgtggttatcgaaatacaaggtgtcatagctgttgccatggccactatccatcccgatcttatagaagtaatcggctgaactttaatttttaattcttaattctataattgcttatgtctctttccgaagaagcaatcactcttcagcgtgctgcgcacgaactgatgtatttgggtatggacggtagtcccgtctatagcgatgacttgtcacggcggaacggtgaggtctaccgtcttaccatggctttgtaccggtcgggtgtaaaaggcactaccatcgacgagcaggcaaatgtctgtcttgcccttcttatgggttacagcgcctcttttgtcgaccatggcgaaaagcagcggcatgtccagaaagtgctggactgttgttgggatgtgctcgatgcccttcccgcttccttactgaagctccgtctgcttaccgcctgctacggtgaagtgttcgacgagtctttggccgacgagggccgttccatcatcgcctcctgggattccttatcacttactcccgaacagcaggaagcggttgatgagtttcagaatgtgacagacaatccctatccgtgggaatatatcgatgaataaaacttttcattataatgcttaacaataaatccgtattgattaccggaggaacgggttccttcggaaagaagtttgtggaaaccatcctccgtgattatccgcaagtaaagaaaatcattatttactcccgcgatgagctgaagcaatttgagctgaaacagaaatatcccggtcataagtatccgcaactgcgtttctttatcggtgatgtccgtgacctcgaacgtctgacgcgggcttgcgaaggagtggacgtgattatccatgcagccgccatcaagcaggtggataccgctgaatacaatcccgaagagtgcatcaaaaccaatgtacacggtgcgcagaatgtgataaaggctgctcttgccaccggtgtacagcatgtggtggccctttctaccgacaaggcttgtgcccccatcaatctttatggcgccaccaagctcacttccgacaagctgtttactgccgccaacaatatcagcggttccaagaacatcaggttctccgtagtccgttatggcaatgtgatgggttcccgcggttccgtaatccctttctttatcaacaagcgtgacaacggggcgaaggaacttcccataaccgatttgcgcatgacccgtttcaacatttcactggaagccggtgtcgctttggtcatgtatgccatcggacatcacctgggtggtgaaatctttattcctaagattccttcctatcatatccaggacgtggctaccgccattgcacccaatctgccgcaggtggaagtgggcatccgtccgggagagaagctgcacgaggagatgattactgtaaccgatgctcttgatacaatcgatttgggcagatattatgtcattcttccttccgtatctttcaagcacagtcgcgaagagttcatcagacatcacaatgcagtacccgttcccgacggtttccactacagcagtgacaacaatacggagtgggagacagtagagactatgcgcgagaatataaagaaatacgttgaccctaatttcgaggtgaaatgataagcaagcctattccatacggtcgtcagcatatcacagatgaggatatccgggcagtcatcgataccctgaaaagcgattacctgacacaaggtcccaaaatcagggaatttgaaacgaaatttgccgaatatgtaggtgcacaatatgccgtagcggtgaacaatgccacttcggggcttcatcttgcagctaccgcactgaatgtaaagccgggcgacaaggtgattgtcactcccatgacctttgctgccagtgccaactgcatccgctattgtggcggcgaggtggtattctgtgatattgacaaggatacttacctcatggatatccgtaaactcgaagccatgcttaaggctgctccccgcggtacttacaaaggtattgttccggttgattttgcaggctatcctttggatctggaagagttcagaaagcttgccgacgagtacggcttgtggattatagaggatgcctgccatgctcccggcggctatttcatggacagtaaaggcaagaaacaacattgtggtaacggttgttttgccgactgtgccgtattctctttccatcccgtgaaacatatcgctacgggtgagggaggcatggtgaccaccaacagcaaggagctctatgacaagctttgtctttaccgtacgcatggcattacgaaagaccctgccttattgcacgagcatcatggtggctggtattacgagatgcaggagttagggtataattaccgtctgactgattttcaggctgccttgggtatttctcagctggagcgtgcgaaagcaggtcttgaacgtcgtcatgaaatcgtaagacgctataatgaagcgttttccggaatagatggtatcaagactccgttcaatactgccgatgtctatcatgcttatcacctttatatcattcaagtagctgaccgcttgggtctttataattatctgcacgagaacaatgtctatgcgcaggttcattatgctccgcttcatctgatgccttactatcagcagtggggcaataggaaaggcgatttacctatagtagaagagtattacgaacattgtctgagtcttccgatgtatcccacgctgacggacgaggaacaggagtatgtgattgaaaaggttatagaatttgtagcgaaatgaaaaatatagcaatcattcctgcacgtggcggcagtaaacgtattccgcgtaagaatatcaagccctttatgggtaaacctattattgcatattccatagaggcagctttacaaagcggtctttttgatgaggtgatggtttctaccgatgatgaagagattgctgagatagcttgtaaatatggtgctcaagttccttttatgcggagtgccgagatgtcaaatgactatgccggtactgatgatgtaattcttgaagtactgaggaagtataaagagcaaggcaggaagtttgaaacggtttgttgcatttattcaacggctcctttcgtcactcccgaaagactccgggaagcatacggaaaaatgaattcggagatagattccgtcttcacttgtgtggcttattcctatcccatacagcgcagccttcacatcgtggatggaaaaattagtatggtttatcccgaatacaaaaatacacgttcccaagatttagaaccgatttatcacgatgccggtcagttctatttctctcgcactgctccctttgtggagagccggactttttggggtgagaatacagccgggttggtactttccgaacttgaagtgcaggaccttgatacactgactgactgggcattggcagagatgaagtatgagttgcttcataaataa

SEQ ID NO: 1132 - DNA, 18088 bp, unidentified
  source 1..18088: mol_type = unassigned DNA
gtccttgagcttctcgcccagcgtgcagcgcacggctaggtcgaccatcggcacgccggtgaccttggagatgtacggcacggtacgggacgagcgggggttgacctcgatgacgtagacacgatcattctggacggcatactgcacgttgaccaagcccacgaccttcagctcgcgggcaaagcggcccgtgtaatcgaccagcgtgtcaatgaccttctggctgaaggtgtacggcgggtagacgcagatggagtcgccggagtgcacgcccgtgcgctcgacctgctgcatgatgccgggcacaagataatcggtgccgtcgcagatggcgtcgacctcgcactcggtacccagaatatacttgtccatcagcacgggatggctcatgtcaacgtgcttcgtgataacgcccatgtactcgatgacatcggcggagttgtaggcgacgatcatattctggccgcccagaacgtaggacgggcgcatcaggacgggatagccgacctcctgcgcggcctgcagggcctcgtccagcgtaaagacggtgcggccctccgggcgggggatgccgcagcgctccagcagctcgtcaaagcgctcgcggtcctcggcctcgtcgatggcgtcggcgggcgtgcccaaaatcggcaggccgatgtcgtccatgtgcttggccagcttgatggcggtctggccgccgaactgcacaaggcagccgtccggtttttcggtctcgatgatgtggtcgacgctctcggggttcagcgggtcaaagtacaggcggtcgccggtgtcaaagtcggtggagaccgtctcggggttgttgttgacaaggatggcctcgcagccgtgctgcttcagcgtccagaccgcgtggaccgagcaatagtcaaattcaatgccctgaccgatgcggatggggccggagccgaaaacaaggaccttcttcttgtcggggtcgctgcgctcggcaatgaacggcttcgcttcgttgtcctcgtcgtaggtggagtagaaatacggcgtcttggcggcaaattctgcggcgcaggtatcgaccatcttgaacgcggccttcggggcctcgggcagggtgtccacgcctgccagacgcttgatcgttttgtcgaggaaaccgaacctcttggcattcaggtacttttccgtcgtcagctcgccgtttttcaggcccatctcaatgtcggccagatgctgcagcttgtcaaggaaccaccagtcgatcttggtgatgtcgtaaatgacgtcgtgcgccacgccgcgcttgagggcctcgtagacgcagaacgcgcgctcggagtcctgcacatgcaggtgctcgatgacttcttccgtcgtcagcttctcgaaatcgggcagcgtcatcgtgtccaggccgagctcggtggaggaaacggccttcatcatggcgtgctcaaagttgttgccgatggccatgacctcgccggtggccatcatctgggtgcccagagacttgtcggcgtagacgaacttatcgaacggccacttcgggtatttgacgacgacatagtcgagggccggctcaaagcaggcgcaggtctcgcccgtgacatcgttcgtgatctcgtccagcgtgtagccgagcgcgatcttggtcgcgaccttggcaatcgggtagcccgtcgccttggaggccagcgcggaggaacgggacacacgggggttgacctcaatgaccgcgtactcaaagctgtcgggcttcagggcaaactggcagttgcagccgccctcgatgcccagttcggtgatgatgtccagcgcggcggtgcggagcatctggtactctttatcggacagggtctggctgggcgcgacgacgatggagtcgccggtgtggatgccgacggggtcaaggttctccatgttgcagaccgtgatgacgttgcccttggagtcgcgcatgacctcgtactcgatttccttccagccggaaatgcacttctcaacgaggatctgatggatcggggacaggcgcagaccgttcgtggcaatttcgtgcagcttctcgcggtcctcgcagataccgccgccggtgccgcccatcgtgaaggcggggcggacgatgacggggtagccgatgacctcggcaaagtccagcgcgtcgtccagatcttccacaaccttagaagggatgatgggctgatgcagcttctccatcgtgtccttgaacagctggcggtcctcggcgcggtcaatcgtgtcgggcttgcaggccagcaggcggacgccgctgcggtccaaaaatccgttgcgggccagctccatcgacaggttcaggcccatctggccgcccaggttcggcaggatggcgtcgggcttctccttctcgatgatgcgctcgatgacctcggcggtcagcggctcaatgtaaacatgatcggcaatgtcggggtcggtcatgatggtggcggggttggagttgacgaggacggtctctacgccctcggatttcagcgcacggcaggcctgcgtgccggagtagtcaaactctgccgcctgaccgatgatgatggggccggagccgatgaccagtacctttttgatacgcgggtctttaggcattgttgattactcctttcgcggccagcatacggctgacgaactggtcaaacagaaattcggtgtccttggggccgccgttggcctcggggtggaactgcacggtgaagcagttccatttcaagtagtcgacgccctcacaggtgccgtcgttggcgttgaggtagctcatctggccgacggattcgggcaaggtgtccgccataacggcgtagccgtggttctggctggtgataaaggtgcgctgcttggccgggctggtgacgggctggttggcgccgcggtggccgtatttcagcttgcaggtcttggcaccggcggccagggcggtcagctggtggcccaggcagatgccgaaggtcgggatgccggtactcagcatttcacggatgttcgcgatgatttccacgttctctgccgggtcgccggggccgttggagagcatgagaccgtcggggttgagggcggccagctcggcggcagtggtcgtgccgggcagcacggtcacgcggcagccgcgcttctgcaggcagcgcacaatgttgttcttgcagcccaggtcgagcagcgccacgtgcagcggcgtgtcaccccatgcaccggcagccgtcggctcataggtcacggcctcgcggcaggtgacggtcttgacggcgtcgacaacggcgtaggcggcgatctcgggcagcagcgcggccttcttctcgggctcggcgtcggggtcgaactcggtggtgatcgcgccgttcataacgccgctctcccgcagggtgcgggtcaggctgcgggtgtcgatgccctcaatgccgatgatgccgttctttttcaggaaggcatccagcgtttcctcactgcggaaattggatggggtcttgcacgcctcgcgcacaatgtagcccctggcccaaatcttcgtgctctcgacatcctcactgttcatgccgtagttgccgatgagcggataggtctgggtgatgatctggccgtagtagctggggtcggtcagggtttcctcaaagccgaccataccggttgcaaagacgacctcaccgatggtggtaccggggcagcctacgctgacgccgcggaacacccggccattggccaatatcagatatgcctgcataattatctcctaataaaaataagaaataagaaataataaataataaagaatgtggagttttctccctatggtcgaaaacaaaatccgtaggggcggattctatatccgcccgtgcagctgtgccacgggcagtgctgcacggacttttttgagcggagcgcagcgacgcgattcaccgcatttattatttattatttattctttattatttgcacaagcagcgcttacagggtttgcttcgcagcttctttcattttgcggctgcccaggtgcaccagcgggagcttgccctccttgcagatggggcattcctcaggggcgtagttgggcaggtcgagcttgagggcgctggcgacgatggggatcggggacggggcctcggcgcgggtgcggtccacgacgcaggcaatgcccacgcagatgccgtcgttttcctcgatgacacgcttggtctcgaggctggaaacaccggtggtgacgacgtcctccgcgatgatgcagcgctcacccgggttgatcctgaagcgcttgagggtcatgacgttgtcgacgcgctcggtgaagatggcgcgcttgcccatctggcggcccagctcgtaggcgtagacgatgccgcccatggcggggccgaccacgacgtcgatgttcagctccttgagcttctcggcaaccggggccatgacctcggcggccttgtcggggtactgctgcagaaatgccatctggcagtaagcgccggagtggcgtccggaggaaagcaggaagtgcccctctaaaaatgcttcacattcctttaaaacttcaagtgcttcgcgtgccataatttgttcctcctgtatgttattcaacttatagtagcatattttgtataaaaatgcaagtaaaatgtatatggttgggcggcttcccccgcgggggaagctgtcggcggcccgccgccgactgatgagggccgggcttgccgttatagcccgtgaacgggcggatgaggggaaggcagccggtgatttaccgtgcgcaccctctgatctcatccagcgtcttgacgccgtgggcgtccatccactggccgatctcgttcgtgatgcgggtgcaggccttcgggtccaggaagttcgcggtgccgacctgtaccgccgctgcaccggccatgatgaactccaaggcgtccttacccgtcagaatgccgcccagtcctacgacggggatgctgacggcccccacggcctgccagaccatgcgcagggcgatgggacgcaccgccgggccggacaggcccgcaaacgtgttgttgaacacgggacggcgcttttccagatcgatcgcgcacgcctggaaggtgttgcacagactgatggcgtccgcgccggcagcctcaacggccttgcacatctcggggatgctttcggcctgcgggctcaatttaacgatgagcggcacggtgcagaccttgcgcaccgcgctgacgacctcgccggcgtctgccgcgcggatgccgaacgcgagaccgccctgcttgacgttggggcagctgatgttcagctcaataaaatccacgcccgcggcgcagagcatctgcacgccctcgacgttttcttcaatcgtgtggccgccgaggttcgcccagacggtggtgccgcaccggcgcatggcaggcagctcgtggtcgataaagtgctgcacaccggggttctgcaggccgatggagttcatcaggcccgacggcgtctcgtagaggcgctcaccctcgttgccgggctggccgttcagggtcagccccttgccggagatgccgcccagcacgcgcagatcctcaatgcccgcgtactcggggccgaagccgaaggtgccgctggccgcgatgaccggcccggccagccgcttgccgagaaaatcaatatgcaggtctgccatcagtcaaacacctcctgtgcgttaaagaccgggccgtccttgcagacggtgaccgggccgattttcgtatggcaggtgcatcccaggcacgcgcccagaccgcaggccatcttcttttcaaggctggccaggcagggcacgccagcggcggcgcagagcttagccacgccgcgcatcatgaccatggggccgcaggtcagcacaatgtcgtacttgctcacgtccagcaggtcggtgaccaggccgtggtgtccttccttgccggagtcggttgcggcgtagatgtcgcggcaccagggcacaaagcggtccatgccgtaggtcgtgtcgcggaagcccacgaacaggtcggggcgcacgcccgcgcggcagagctccttgcagagcagcagcagcggcgcggtgccgatgccgccgcccaccacggcaatgcgcttgtactgcccggccagtgcggcagtgtcaaagccgttgccgcaggggccggtcacggtcagcgtgtcgtcctttttcagcgcggccagcttgtgggtgccctcgcccttgacctgatacaggaaggtcagtgcgccggtctggttgtcaaagtcgtcaacgctgatggggcgggaaagaatcggcgtggcgtccgcagcccaggcgcgcagcatgtaaaactgcccggcgtggggctcgcggctgcggtcctgccactggaccgtaaggcgcataatatcctctgcgacggtttcctgacgcaggaccgtcagattacagcttgttgcattcaccctgaatatcctcccgcatacgcacgcactcgttgtaggcagcctcgtcaaaggcaacgccgggctgcttcttgtaggccagcaggatgccgcggctggagttgacaacgccgccgttgcccttggtcaggtactgcgcgatgtccgccgccttgccgccctgtgcgccgtagccggggatcaggaagaaggtgtccttgtaggccgcgcggatggcggtggcctcctcggtgtgggtgccgccgatgaccagaccgatgctggaatagccgtgctcgcccatgtagtccttgccaagggcggtcaggctgtcgccgacgaggtcgtacacatggcggccatcgtcgagctttttgtactcaaagtccttcgcgccggggttggaggtgcggcagagcacgaacacgcccttgccctgctcggcgcagtacggcagatacgggctgatggagtcaaggcccatgtagggggccagcgtgatgatgtcggcctcaaaatcaccggtaaaatgcgccttggcgtacatttcggcggtcttggcaatgtcgccgcgcttgatgtcggcaatgacgggcaggccggtggcgcgggccagcttcagcgtttcggcgtaggcgcgcatgccgtccaggcccagggactcataataggcgatctgcaccttgtagcagcccgcgacgccctttgtggcgtcgatcagcgcacggttgaacgcgacgacgttctcccccgccgtcttggcggtatcggtggtgggcaggtagctgatctcggtgtccaggcccacgcagaccgggccgtttgctgcgacgctctcgtagagcttgtccatgttggtaagcatgctgattcctccgtttgatgtatataaattgcggctctattatataaagttgagaatcgtaggggcggattccatatccgcccgcgggactgtgccggcggcagcctgcacgggtgcatatagaatgcgcccctacgggtgttttgtgcgtgaaggggtgttattcttcaatctggaacgtaaccttcccgcctttgatcgtggttaccacttttccgtacagcagtgcgccgtcgtaggggcagttcttgctcttgctgtgcagctcgtcggcgtggacctcgtacatgtggtcaaggtccaccagcacgatgtcggcgtcgtagcccggctccagcatgcccttgcggtcggtcaggcccagcacggcggcgggaccggcgctcatcaggaagctgagcatttccagcggcagacgctgctcacggcagagcttggtgtagcagacgccgaaggccgtttccagacccaccataccggcagcgcccttctccttctcctcggcggtgtggggggcgtggtcggtgccgatgcaggtcacggtgccgtccttgatggcgtcgatcagcgcggtcacgtcgtccgccttgcggataggcgggttgacgcggtaggtcaagcggctgtcgtcaaaccacaggtggtgcggcgtgacctcgcagctgacccgcgcaccgcgcatccggctcatgcggacggcatcgacggattccctggtggagacgtggcacatgtgcagccgggtgccgtagtactcggccagatggcagttgcgcacggtctcgatgttctcggccaggcggtagtcccaggggctgatctcgcggtcctcggcgtgggacatgatggtcaggccgcgctcggtggcaatcgcgaacgcgcgggccatgacggcgttgttcatgacaccgttgccgtcctcggtgatgaacttgatgtcctcaggcagggtcagcagatgatccagcgttttgccgtcgaaatccttcgtgatggagacggtctggtttgcgtcgcacaggccgacgcgggcggcctcggcctcgacggcgtgggcgatctcggcactggagcagaccggcttcgtgttgggcatcaggttgacgaaggtgtacccgcccgcggcagccgcggcggagccggtggagatgtcctccttgtactcaaagccgggggtgcgccagtggcagtgggtgtcgatgaaggagggcaggaccgtgcggcccttcgcgttgagcacctcctccccttccgggacaagcagccccagaccgacagcggcaatttttccgtcgcgcagccagacctcaatggccttgcccgcgctgtcctttgcgttgcggatcagcatggtgggaacctccttaaaaataggaaactttgtcatagctgagagtgtaggggcgaacattgttcgcccgtcaactttgcgtggttgagcttctgcgggaaagccgcgcatgaggcaaacggcctgcgggcgagcaatgctcgcccctacaaagccccatgcaaaaacatcccgcagggatatttttgcaaaaaaaaacttttcccaaaaagggaaaagtcaaaaagtcatacacaaagcagcgacgggaaagaacactgcgctgtgatttttaaagacagaaataaaacgcatcatcccggcacactctttcctatggctttacctaagttttacttattgtaccatgcaggggcggcggtgtcaatgcaaacgggctttttgcaaaagtaaggattttatagatttttgcgctgacttttggaggatttgacaaaatccgcaaaaatccgcgcgcggcgcgtacagcattgcactttgtccggctttgtggtatatttacaataagtatggtaaataggaagaggaacgaactatgggcctttgggaagatgcaaaaaatatccgcgataaggaccccgccgcgcgcaatgtggcggaggtcatcgtcctgtaccccggctttcatgtgctggtcacgcacaagatcgcacattttctgtacaaccaccggtgtttcttcctggcccgttttgtcagccagctggcgcgccacctgaccggcatcgagatccaccccggcgccaagatcgggcgcaagctctttatcgaccacggtatgggcatcgtctttggtgagacgacggagatcggtgacaactgcacgatctaccacggcgtcaccctgggcggtaccggcaaggacaccggcaagcgccatccgacgctgggcgacaatgtgctgatcggcgcgggcgcgaaggtgcttggcccggtctacatcggtgataacgtccgcgtcggcgcgggcagcgttgtgctgaagaacctgcccgccaacgccactgccgtcggtgtacccgcggagatcgtccgcgtcggcaatatcaagtgctgcccggcggacgatctggaccagcaggatctgccggatattgtcaaccagcgcatctccgagctcgaagcccgcctgagccgcctggaagccgaaaagcagggtgagttcccgccggataaaaaagaataataaaaacgcacgccgtgaaatttacggcgtgcattttttgtcagtatagcttccccagagggggaagctgtcagcggccccgcccgctgactgatgaggggcaaacttaccgggaatgtcccacggacgggcaatagggcaaacccgcccctcatccgccctcggtcggggcctcgggcacctttccccacgggggaaggcaatcaactcatttcagatttcgcaaatccccgctctcgcggaaatcctcataatccagcgacagcgatgggctgtaataggggtcgtgcagaatattctcccgcccgtgcacggcgtagagacgttcatgctcggcgtcaaagcgtgcttttttggcgggatcgttctcgtcggagccgcgggacttgctttcgtagtggtagagctcggcgtagggcgtccagacaatgcgccagcccgcgtcgcgcacacgcaggcagaagtccacatcgttgtaggcaaccgtgaactcctcatccaggccgtgcagctcgtcgtaaacagcggtgcgcaccagcaggcaggccgctgtcacggcggagaaatcctgcaccgtggccagccggaacatatacccgctgccgccgcgcttgtggtacttgtggctgtgcccggcgtagccgcccagccccgtgatgatgccggcgtgctggatcgtgtcgtcgggatagtagagcattgccccgcagaggccgacgccgggctggctgcactcgcccaccatctgggtgagccagtcgccgttgatgacctcgacgtcattgttgagcagcagcaggtacttgcccgccgcgtacctgcggccaaaattgttgatgcggctgaagttgaagccgcccttgtaagtcacgacccgcgcacggtcataccgctccggcagttttttgtagtaggccgctgtggccgggtcggtggaattgttctcaatgacgatgacctcgaaattctcgtaggtcgttttgacgtagatgctgtgcaggcatttttccaaatcgtcggtgtggtccttgttgggaatcaaaattgacacgagcggctgcggctcgggaatgtcccacaccacatggcaggtgcccgggaatttgcccggctccaccctgccctgccgccctgtggcggccagatggtcggccacggccttttgcgcagccttttccacatagggcttggccgccgtgccgccgctggtggacgccgcgtgcacgcgccagtaatacagcacctgcgggatgtgcagcggcttggcttcggggtcacggcgctgcatttcgtcgatgagacgcaggaataagtcgtgatcctgcgcgccgtcacaggccgggcgctcaccgccgacggcgtcgaacagtgattttttgaacacggccagatggcagatgtagttgacggccatcaggtactcgggcgcatagtcgggcttgaagtggccgacgcgcgggtgctcgggcgttttctcaaacagggcctcgtcgctgtaggcaaacgccgcgccgctctcggccagcgctttgcttatgcaatagacggcatgaggcgcgagcatgtcgtcgtggtcggcaagggccagatactcacctgctgcgagcttcgcggcctcgttcgtattggcggcaatgcccttgttctcgattttggcgtagacgatgcgcttgtcctgcgcggcgcgggtgcggactgtctcgcccacgtcggggtgggcgccgtcgctggcgtccaccagaaccagctgccagttcggcgcggtctgggcctgcacgctgtccaaaaaatgctgcaaaaactgcggcggagtgttgtacagcggcgttagaatgctgatgatcggccagccgtcggcgcgggcggctgcgtcggcacgctgggcctccagcgtctgcttcgacggcagataccgcgcttttttgccgaagaaccgccgcttaaaaaagccgacggcccgcccggccatgacgccgacgccctgttctttcgtcagcgtccgcgcatagccgaacagttctttgatgcgtttcgtttcaaggctcatgggatggctcctcataaaagcagtctttgtgccaaaggcgggggttggattgaatgtattccgcaatcatgcggtaatcggtttcattgcggatgacgtggtcgtgaaaggaacgctgccaaaggtgcttatcgaacggtgcggcttgcccgcgcttgacaagatggatgtactcgacggtagaataccgtttgaacgcctgcacgatgctgataatcgtaggggcggattccatatccgcccgtgcccgttcaatctcgaccaacgcgtgaaaatgattgggcatcaccacaaaataacggcaatggaccgccgggtattggccgatgatctcccggaaaacgcgcgccaccatgcgggcggatatagaatccgcccctacgggttcacggtttgtgccaaacaacattttacgctgatgcgtacaaatcgtgataaaatatgcaccgttccggccgtaatcgtaaccgcgcagatgatgaactttccgttttggcaacgcgctttccattatacctacccgtgcaacccttttgcttggcgctccatgttttctacgatgatggtgttcaattcgccgagggcggcggcgtactccaaaaccttccacggggtgtcggtgtggtaatgcaccttgacgacgtcttcgtcgccgacaaccaacaggcaatcgcccttggcgctgttcaaaatgccgtcgtggatggcgtcctcgtcgaggtcgtggccttcgattagaaactgggtatcaaacttattttccatgcaaaacacctcctcacttcaacccgaaattctcaaacagattgttgaaatgggggttgtaataggggtcgtaattgtcgatatactgctgatatttcgcgtagaaattcgccttttcgcgctcataccgcttggcgttctcgcttaaggtatccaggccgcggctcttgctctcatagtgataggcctcggcgcgcggggtgtaaacgttcaacagccccttctgccatagctttaagcaatagtccacatcgttgtaggcgacggcaaacttttcctcgtccagcccgccaaatgcgcggtagagcgacgcttttgtcatcaagcaggcacccgtcacggccatataattctgcgtcgtgaccaagcggtacatgtcccccacagcggtgcgggggtagctcttgtggctgtggcccgcgctgccgttgatgcccatcagcacgcccgcgtgctggatcgtgtcgtcggggtagtagagcttcgcgcccaccgcgcctacgtcgggccgctggctgtagctgagcagctcgcgcaggaagtcggacgacaacacctcaatgtcgttgttgagcagcagcaggtgctcaccctcggcgaacgtcgcgccgaagttgttgatggccgagaagttgaacgcgcctttgtagtagacgacgcggcagtcggcaaagcggctgggcagtgtttcgtaatagacaaacgttgccgggtcggtggagttgttctcgatgacgatgacctcaaaattgtcgtagcccgcgtttttgtacaggctcgtcaggcagcggtccaggtcgtcaatgtggtctttactggggatcagtacgctgatcttcgggtggccggtcagctcgtaccgcacctgaaatgcgccgggcgcgtcgggcacggccatggcgtggcccggcagaccgagacgcttgagctgcgcgtcgatggcgcgttcccccgccgcgacggcgtagggcttggcctccatgcccgcggcggtggagccggccgcggcacgccagatgtagagcaccttcttgatatgctcgatgcgctgtgctttttctgtcaggcgcagaatcaaatcatggtcctgcgcaccgtcaaactccttcgattcatacgcgcccgccgcgtccagcagcggacggctgaacaccgccagatgcgtgataaagttgaccccgcgcaggtagtcgggcgcaaagtcgggcttgaagtggtatccgcccagctccttcaaatcggcggagagaacgatttcatcactatagacaaaatccgctccgctgttttgtatcgtctgcacaacctcgaacagcgcgttcgggtagagcacgtcgtcgtggtccagcagcgtgatgtactcgccgtgcgccagcgcaaatccgcgggtcgtgttgagggcaatgccgccgttttcaatcggctcatacacaatcgtgccgggcacagccttgggcagacggcgctccagccgcttgtcggcgtcggatgcgtccaccagcaccaattcccagtttgtgtaggtctgcctgacgacgctttgcagcatctcgtcaaacagtttggcgggcgtgttgtacagcggcacgatgatgctgatcttcggcccctgcaggtgcgcggcgcgctgggccttcagctcccggcgcagcggaatgtcggcgcggtgccgccagtcgtcgtggtgcatcgccagcccgacgcggaatttcacatcgcgccagagctgctcggccccctgctcccgcagggtcttgacgctgcgccccgcgaggtcccgcaggtgggcggggttcaaaagccgccgcgccatgccgccgacgctgtcctgtacggccaggtcggcagggcgctcgttgttcggtttcgtgttctcggacatagcttattcctcggtgactttggccggcatggcgtcctttttctcgaaccttcggtactcggcggtaatttccttcgtcgcgccgatgcggcgcagatggccgtggtcgagccaggctaccttgttgcacatacgctcgatctggtcaatggagtggctgaccagaatgaccgtcgtgccgccggacagcagctcggccatgcgcttctcacacttctcctgaaacaggaagtcaccgacggaaaggatctcgtcggcaatcaggatgtcgggcttcgttatcgtcgccacggcgaacgccagacgcgcgaccatgccggaggagtagtttttcagcggcacgtcgagaaactcctgcaattcgctgaattcgacgatgtcgtcgaactttgagtcaatgtacttgggcgtgtagcccagcacggtgccgtttaaataaatgttttcccgtgcggtcaggtccatgtcaaagcccgcgcccaattcgatcagcggcgcaatcgtaccgttgaccgtgaccttgccggcgctgggcttgtagacgccggaaatcactttcagcagcgtagacttgccgctgccgttcaggccgatgaggccgtagaaatcgccgggcataatatcaaacgatacatcgtccagtgcgaagaactcgtcaaaccgcacaccgccgtgcagcagtgcgacgaagtactctttcaggctttcgtgcttttccttggagaggttgaagcgcatcgaaacatggtcgatggagatgatgggtttctgctctgccatttcgatgcccccttacatgtacaggacgaacttgtcctgattctttttgaacacccagacgccgaggcccaggctcagcgcggcacagaggaacgggatcagcaccatgttgggggtcagcccctcgccccacatgacgcaggaacgcacggcggtgatgtaccagtagatggggttcaggttgatgacgtactgcatccagctttccatctggcgcgggtcgtagaagatggcgctgccgtagacaagcagtgtgcaaaagacctcccagatatgcatgatgtcacgcacaaaaacgtagagcgtggacaaaatcagcccgatgcccagactgaaaataaacagcatcacaaggggataaatggccagcagcacagtcccgatcgagatgtgcgaccaggtcagcagcgcgacgataaacagcgccacgaggctgaaaaagaagttgacgagcgcaaagcagcacttttccagcgggaagatgtatttgggaatatagaccttgcgcagcagcgggccgttcttcagcacactctccatggccatggtcgtgctctcgcggaagaagttgaacatcagctggccgatgataaggaacagcggaaagtcctcgatgccctgaccgcgctggttgaacagcgcaccgaacacggcccacatgaccaggcaggtcagcagcgggttcagcacgctccacgccacgcccagcacgctgcggcggtatttcagtttgaaatcacgggaaatcaggttttgcagcaggtaacggtatttccagaagcctgcgaaggtgtctttcagtttctgcacggtttaccctcaatatttctcaaaatattcgaacttctgggcggcaaacggggtgtgctccttgtccttggcgctggtcttgtgctcgcagccgcagtcgggccactgcacgttgaccgtcgggtcatcgtagggaatgccgccctcggcggtggggtcgtagacgtcggtgcacttgtagcagaactcggccacatcggacagcacgacaaagccgtgggcgaagccctcggggatccagagcattttcttgttgtcggcggacagcgttgcgcccacccatttgccgaaggtcttgctgttggggcggcagtcgacggcgacatcgaacacctcgcccagggtcacgcggacgagcttgccctgggtgtgcttggtctggaagtgcaggccgcgcagcacgcccttggtggagcggctctggttatcctgcacgaagggtttgtcgatgcccgctgcggcgaactcgtcgatctggtaggtctccataaaatagccgcggtcatcgccaaaaacagtcggctcgatgatctgcacgtcaggaatatcggtcttgatgaaattgaacttgctcatggtttggaatctcctttttatatttcatacgtctaatacatagcgatacaggatatattatactctatttcgctgcgccgggcaagatggcggaaaaattttgccgctgctgtaacaacaggacggcttttccgtcttgttaagtagagggcagatatggtatgatagcccggaaggtggtgtgcagaatgacaaaacgcgaagcccgcgcatgggccaaggcccggcgcacggaactggatatggcggctgtgggccgcggtatggcgcaggcgctgttcggcctgccgcaatggcagagtgccggggcagtgctggcctttgcggccatgccggatgagccggacacggcggaaatactaagacgcgcgctggccgacggcaagcgcctgctgctgccccgcgtgcggagcaaaaccgagatggactgggtggagataccggcattgcgcctgctgcggcccggggcgttcggcagtcaggagccgcccgccgacctacccgccgccgacccggcgggatacgctgcggcgctggcccttgtcccctgcctggccgccagccgcgacggggtccggctggggcgcggcggcgggtattatgaccgatttctggcacactataagggagcggggctgctgctctgccccgaggccctgctgctggacgagctgccctgcgacgactgggacgcacgctttgcgcccgagaatattctgaccgagaaaggaattttatgatgaaaaagctgctttttgcaacagccatgctgaccgccctgttcctgtctgcctgcggcagccaaaaggctgaaagcaacgatcttgcgaaccaacctgccacaagacccgaggaaggcgcggagctggacccggagttcagcgttgacggcgaggataccggtgagaccgccgagccgcagccggacgcggagctgagcgagatggtggatgctatttataacgtccagccggttgacctgatgggcatggagacagtggccatcgacctgaccgacgagagctggtacggctatctggcagggctgaccgcggacaatgtggacaaggtggatgccgcagtagtcagcgagccgatgaccggaagccaggcgtacagcctggtgctgctgcgcctcaaggacaaggccgatgcccgcgagatcgccgattcgatggagaaaaacatcagtatgcgcaagtgggtctgcgtggaggcggataaagcccgcgtggtcagctttgatgataagctgctgtatgtcatggcagacagtgagctggtcgatgccgatctggtggcggatgctgccgcaaaggcctttggtgcgacatttgatgtcgatgattccctcgtcaatgaggacgagagtgagctgccgccggagctgctgaccgccccggctgtggcagactgagcgatacaaaaaaacaaag

SEQ ID NO: 1133 - DNA, 26084 bp, unidentified
  source 1..26084: mol_type = unassigned DNA
ggaagttcaggccatgagcagcagcgtaagcagctgcgcccataccgccgttgccagcgccgacgatgaggatgtcggtgtccacggtctcggtgatggcagcctcgtcgatgtcaggctccttgcccagccaatcgttttcgtcaccggtgggcagctggacggaggtcacagtagcctcgcccttggcctgagcgtaacagctcttggcagccttcatgacagcgtcggaagtgatggtggaaccggaaacgccgtcgatctcagcagagcctgcagccatcagctgctcccgcagctggtcggcagcagcagcgccgtaggaagcggtctcgccggaggtatcgaccacaacgtcggtcacagcgctgtcggagaaggtcatggtgaccttgacggtagaagagatgccctcagcagtaccctcataggtgccggggatgtaggtaccggctgcaccggaagcagcagtggaagagctggcagtgttgcaggcagccagagcaccggcggtcacaccagacatggcagctgcggcagcgatcttcagaaaacctttacgggagatcttgttcattttgcgtggttcctttcttcgtgtctttttcttcttctctattctttctcatagctccgtgcggcggcagaccttcttgcactgccgcccacatcgttcgataataatttaacacaaattcaagggtctgtcttttaagaatccttaaacatcctagccatttcttagtcgattccggacattcttgttaattatttgcttaacaagtccaaaaagagcgccgaccgcttaagtttccttaagaagtcggcgctctcatcaaaacgattcttaaaccttgccgccgtccggctggaacacataacccttgccccagacattttttaagtagacgggctttgccgggtcgggctctatcttgctgcggaggttgtggatatgtacctgcaccgtccgcacatcgccgaggctttccttgccccatatcttctggtagagctcgttggccgtgaagaaggtgttcgggtagcggacgaagagggtgaggatgcgatattccatgtcggccagatggacgctgcggccatccttctccacgctgtggctgttggcatccagcgtgaaggccgcgcagtggtagccgttgacgctgggctctgcgccgtccatctgcacccggcggatgttggccatgatgcgggccagcaggatcttgttattatagggctttgccagaaagtcgtcgccgcccatttccagcgcgcggacgatggtgtcggtatcgtccagacaggatgtgaagatgatggggcagtggtgccagctgcgcagacgctggcagaggtctacgccgttggtgtccgggagaaggatgtccatcaggatgacatcgaacttttcccgcgcatggctcaaagcgtctccgcccgtctctgcacagaccacctcaaaattctgctgacttttcagaaaatagcatgtggtgtcgcggatcacggggtcatcttccaccaacaatacgcggatcatcctgtcagccctccccttttttcgcacgatttgttatactatagtataccttattttttgcacatctacaaggggaggcatcgccatgaagcaaaaatggcccattctgattttctccgccctgctcacggccttcatcgtgctggccggtatctggggcaacgcacagttcgagcgcctgcacagcggcagcgtgctgacggcggaacacgccgcccagggtatcgcactggacggctggcagcaggaagcccccggccagtggcactttactttcatggtggggaaagacatcccttccctcaccctctgcgtcaccaacacagcggcgccgctggcccatgagagcctcaccagcctcgagcgctcgggggagctgtacgcactggacgtcacgcccggcgagacggtggagctggtgttcacctgcggccgcagcccccagacatggctgatgacttccgccttcgcctcccgggcattccgcttccgcaccatgactcaggtcatcgctctgacagcctttgtgaccatggggatggtgctgctggcgctctaccactataagcacctgccggagctggggtacttcctgctctacctcgtcatcatgagcgcgtgggcgctgctggtcttcttcttcccggccatccggagcggcccgctccagctcatcctccgctccttcttctccctcactgtgctggcctcggcacttctggcggcagggctgctgggggtaaaactgccccgctccgggcgggggctccttgcgcttgccgccggatgcgtcgtcttctttgcactgtccacgagcagctatcccccgatgcgggtcgggatgctgatagcgggcatgtgcctctgtctctactacttaatggccgccgtaaacgcagaccatgaaggtgccgctctgatgctcctgcccggtgctgtcaccaccggcttccgggtctgggcgctgatgcccgggctggacagcgcgctttttgtggagtctgtccccttctacctgctgcgctgttcccgcctctacgaccttccctttgccatcggctgcatggtgttcgtctgccggaggtttgctctcctcttcgaccgcaccgagcagctggcccgggagctggacgcccgggtggcagagcggacaaaagagctgaccgccgagaccgaggcccgcaagagcatgatgctcaacatttttcacgacctgcgcagccctctcttcgccgtcagcggcgggctggaaacgctgggatcggcccccgaggcccttccggccctgcttccggctctgcgtcagcgcattgaattcctgcggcggctgacggaagacctcttcctcgcggcaaagctcgagcagaagcagatcctgctcaacgaagaccgcgccgccctcaacgaggaagccgccgccgtctgcacctcctgccggagcgaagccgacaaaaagggcgtcgaactccatgtcagcgccgacacgcctctgcccgtctggggcgacagcgtgcggttgcagcaaattatccagaaccttgtcaccaacgccatccactatactcccgccgggggcagcatccatgtggactgccgcgccgaggacgaaacggcctgcgtcagcgtacaggacaccggctgcggcatcgcgccggaagaccagagcgctgtctttgaccgatacttccataccaccgctgacaaaaagcacgactccaccggcctcggcctgaccatcgcgcaggagctggcccacctccaccacggcgagatcacattgcaaagtgaagtcggcaagggcagcatgttcacgctgcggctccccttacttacagactgagagggcaaggccgctgataagatccatcgctttatagccaaagaggacatcacgcaaaacccttgcatgatgtcctctttctttgttatttcagcagctccgtcagctttgccagacgatacaccgcctcgtccagcacgtcggtgccgcgggcaaaatgcatccggatgaggtggttgaccggctctttgaagaagctcgagccggggacagccgccaccatggcctcggtgcggctgcaggtgacgcagagttccgtgttgggatccacctcttagtctcccctcgagaggggagctggcaccgaaggtgactgagaggttcagtccttaaaatacgcattctgcacagccagcaggacgcctgcgcggctggcggcgaagttcaggccgccctgcaggtagcaggtatacggctcacgcagcgggccgtcgcaggaaagctcgatggtgctgccctgggtaaagctgccgctggccatgatgacctcgtcggtgtagcccggttccggagagggttccggggcggcgtagctgtccacagggcttgcggcctgaactccccggcagaagccgatgagggcgtccgccgtaccagcatcaaagcaggtgacgatgtcgttgtgggcctcgcagtagcgcgggatgggctttttgcccaccagttccagcagacactgggcgtagatggccgtcttgatggcttcgcagaccacgccgggggcgtagtagaagcccagatacatatcgcggggcgtctcgagggtgcagcccagctccttgccgaggccgggggcgttcaggcggtaggcgcagagctccacgaggtctttccggcctgcgatatagccgccggtgggggcgatgccgccgccggggttcttgatgaggctgcccaccacgaggtcggcaccggcctggcagggttcttccttctgggtaaactcgccgtagcagttgtccacaaagatgatgatgtcggggttggcggcgcgggcggtgtcggccaccttgcggatggtgtcgaggtcgaaggcgttgcgctgcaggtagccgcggctgcgctggatgtggcagaccttcgcgcccggggctttctgggcgatgagctcatagtccggggtgaagtcggccttcagtggggcttcgtcgtacttgatgccgtaatccatcagggttccggtgcctttgcccttgccatccagaccgatgacgccttccagcgtgtcatacggacggcccgtggcagccagcagggtatcgcctgcccgcagcagaccaaagagggccacagccagcgtgtgggtgccgctctggaactggctgcgcaccagtgcatcttcagcgcccatcacctcggcaaagatctgctcaagcttggcgcggccggtgtcccacaggccgtagccggtggtacccagcatatcggtggaggacatctgggtgtccgcaaaggctttcagcatcttgagctggttgtaatcgcggatgtcctccatctgcttgaagtagggctggcagagctcgagggctttttcatccagcgccagaacttcgggtttgtagtcgaaaaagtgatttaacattgacattataatgaatccttcattgttattgtactttgaaaaattgcgttcgcgcagggaagctgtagttttcgtcaggtctttttgagcggcatttcgcgccaccggcgcgcaagcctgcctcacggcgcggcataccttgcatactcccccatcttctcaaagcccagccgggtatagaaatgcacccgctcggggctgcacaggaagacaggcatccagccttcggcggcgagggcattcgccatctcgacgatgagccgaccgccgacgcctttgccccgcagagcttccacggtctcgccgcaggccatgtatgcctgaccatttgccagcgcgtaggctcccaccgtacagatgatgttcccttcccgttccagcgtccagacccgggcaagaccccggctgcgcttggagcagagctcagagtaaaagtcgtcccgttttgagggcctgtcagggaagagcagatccgctgcttttccggcggcaggttctgtgtttttggcaagactctgccagagggaagcgtccgcctcaggcagcggcagctgacgccccggcgcaaggccaaagacgctgtgtgtcttggcccgcttccagccggtgggcggcggacactcggcttcatccagcaccacggcctcacagccgcagaaagccagaaagcccgccagctcctcggggttggcgtgacccgccagccacgcggtgctgccgccgacatccagcgccagcgtcggcccggcgaaaaagcggcccggctggctcttgccgaagagggcgaacgccagcggcatggtcgccccgagacagagcttgccccggcaggcattcaaaaagcgctgcttctggcggggcgttttgatttgggcgatcacttcagcgcgttgacgatgctcttgaactcgcggccgcgcacttcaaagttcgggtagaggtcgaaagaggcactggccggcgagaggatgatgatgtcaccgggctttgcgcaggcgcgggccagctccacggcgtgctgcatgttgtcggcgtgctggatgggcagctcggcctcgttgaagttcgggtcttcgcgcacggccttctcgatgcgggggccggtagcacccatcagcacgaggttcttgacatgggccgtgatctcaggggccagcggctcgtaggggatgtgcttgtcgtagccgcctgcgatgaggatgaccttctggtcgaagctgcgcagaccggcaatggtgcgggtggggctggtgccgatggagtcgttataataagtgacgccgtccagcacgcgcaccggctcgatgcggtgctccacgccggtgaagctgctgcccaccagctggatggcctccacaggcacctcgccccagacggcggcggcagcggccagcaggttctcaatgttgtgcagaccccgcagcttcacgtccttctgggcgaggaagggggtcacgacgccgttctctgccatgcagagcatcccgtcatcccgcaggaacgcgccgttgtccgtctcgtgcaggcgggtgaaccagacctgcttgcccttgcagtccttctgcatggagcggctgatctcgttctcatagccgaggacagcgcggcagggctgcttctggtagagcaggatgttgcgcttggcgtcgatgtactcctgcatatccttgtggtggtcgaggtggttgggggtcacgttggtgacgacggcgatgttggggctctggtgcatactgatgagctggaagctggacagctccaccacggccacgtcgtcggggctcacctcgggcagcatgggcagcagggctgcgccgatgttgccgcccagatgcaccctgcggcctgcggcctcgtagaacttcgagataagggtggtggtggtggtcttgccgtcagaaccggtcacagccacgatctcgcaggggcagaactggaagaacagctccacctcgctggtgaccatggtgccggcggccatggcgtcctgcaaaggcttctcgaaatagcccacgaagcccggggtgcgcatgatgatgtcctgccccttgaagccgtcgaggtaattctcgccgaggctcagatcgatgcccagctccttgatggtggcggcgtagtcgccgaaatcttccacgctctttttctggtcgcagagggtgacgtgcgcacccagctccacgaactccttgatgagcgtcttatggctgacgcccgcgccgataaaggcaacctttttgcccttgatgaggtttgcaagctcctgctgttccttctgcataaaaaaggacctcctctataaatgtatattaccatagcacccccgccgcacacagccgcaggagaaaatgcattgctgttccccattatagaccatttgtttccgattggcaacggaaaaacacaaaccgtggctcaaaatgtccactcaaatcaacaaaatgtcgattgtcttttctgcctgtttctgttacacttatagcgatttcgatttttggcgcagcatcaacagcattgcgccggctcgacaccagaattttcctgcgcctgtccgggtgcagttttcgtatttcttatcactttctgagacaaacagggccgcaccggcccgaaaggatgcatttcttgagacagcttcgctttgtcgcggccctgctggctgcgtttttcgttctgagcctgaccgcctgcggctccggctctaacagtttcacctggttcgtggactccatccccgcgaacctcgacccgcaggtggcgtccagcgcctcggacatcatcgcctgcgagaacctctacagcggcctcgtccgccgtacaccggacggcagcctcgcgccggaattgtgtgagcggtgggaggtatctgccgaccggctcacctatacattctatttgaaggacggtctgacctataccgcctcgaagggagatcccaccgactacgccatcaccgccgaggacttcgtcttcgcgttccagcggatgttcctccccggcaccaactccccctacgccgtggagttctctgccctcgagaacagcgccgccgttctggccggtcagaagcccgccagcgcgctgggcgtcaccgctgcggagccgctgaaactggtgttccgactctcctcgcccgacgagacgttcctctccaagctgacgctgcccggcgcgatgccctgcgacgaagcgttttttgacagcacccgaggcacctacggtctgaccagcgcttccaccctttccagcggacacttttacctttataactggacgtccagcggccttttcctccgccgggcggcttcggggagccaaatcgacagcctgcgcctcgtggagaacaccacgagctccggccagtccgccgaagagctcatcaacaacgaaaaatgcaccgccgccctcgacgacagcggtacccccacctcgctgcagagcgtgtcctactccgacaccacatgggcgctgctcttcaactgcgactccgtctttgcttccactgagcttcggcaggcactgggcagtgcagccgcttcggcggtggaagtccccggcggcgggctgttcgcggaggcaaagggcctcatccccgacggcctgactgtggacggcatcgactaccggcagacggcgggcgatgtccgcccggccttcggcgccccccgcgcactctacatcgccgcccgcgacggcggtgtctccccctccgactttgggcgcgtctccctgctgctgccctccggcagcggcctcagtgacaccgccgagctcatcaacagcgcatggcagaaggagttttcgctcttcttctcggtggaagaggtggaaccggaggagttccagaagcggctcgaaagcggcagctacaccatcgccctcgcccccgtgcaggccgagggcggcagtgtctacaccgcgctggcccagttctcccccaccggcggcgggctgaccggctacagcgacgccctttacaccacccagctctcggccagcgccacagccaccggcagcacccgctgctctctgctggccgcctgtgagcgccagctcctcgagcaggctgttgccgtgccgctcttcacccagcagaagcggctgctggtggccaacggcatcgagggcctcgtcttcgaccccttcggcccggtgctggatgtgacgtatgcgacgaaaagttgaccgccgcttaagcctctccctttgggagcaacggcgacgaccgccgccagcggcggaaacagggaggagctgttggggcagtggccagcaggatgcgagcggcagcgaagcaaacgctgggagccgcaacccgggcagtgtcaccgaaggtgacggggagggcaaggatgctgacgatcaaatataagcgcagcgatagtatccctccgacaaagagtctgcctatcgcaacgcgaacgggcttgccctctcaggcgcttacgcgccagctctcccagagggagagccttttggaaacggctcacagtcagataaattcatcaagcataaaaaaaaaacagagaggatagttcaggaatgactatcctctctgttttttgcttttttacgttaatacgaaggtcagctctgcggtggcggcgcacttgccgtccacataggcagacgctttgccgatgcccaccgggccgcgctgctcgaccagttcacagtgaagggtgagcacatcgccgggggtgacctgcttgcggaagcgggcgttcttgatgccgccgaagagggccagcttacccttgttctcaggcaggctcagggccgcgacagcaccggtctgggccagtgcttcgaggatcaggacgccgggcatgaccggctgtcccgggaagtggccgcagaagaattcttcgttgcgggtgacgcacttgcggccaatggcccactgacccggctcgtagtccagaatgcggtccacgagggcgaagggataccggtggggcaggatggccgcgatctcctcgctggtcaggctgtttgcgttttcacgcacggtgcggggttctgccatcgctcagccctcccacttcttgaaggccaggcaggcgttgtgtccgccgaagcccaggctgttgctcagagcgtactccatcttcatctcacggcccacattcggcacatagtccagatcgcactccgggtcgggctgctcgtagtggatggtggggggcgcgaactggtcgcggagggccagtgcggtgaacacggcctcgatgccgcctgcgccgcccagcagatggccggtcatgctcttggtgctgacgacggcgatgtccttggcgtggtcgccgaagacggcgtggatggcggcagtctcgcagctgtcgttcatgtgggtgccggtgccgtgggcattgatgtggtcgatctgctcgggggcaatgccgccgtccttgagggtcagcttcatgcagccgatggcgcctgcgccgccgggtgcgggagccgtgaagtggtaggcgtcgcagttggcgccatagcccacgacttcggcatagatgtgtgcgccgcgggccttggcgtgctccagctcttccagcaccagcacaccgctgccctcgcccatgacgaagccgccgcgccgtgcgtcgaagggaaggctggctgcatcagggtccgcagcagtggagagggccttcatgctggtaaagccgccgatgcccagcgggctgatgcagctctcggcaccgccgcagaccatgaccggctcgtagccgtcgcggatgcggtggaacgcatcgcccacagcgttggtgccgcctgcgcaggccgtcaccgggcaggtacacatccccttgaggccgaagcggatggcgatctgtgctgccgccatgttggcgatcgccatggggacgaagtaggggctgaccttctccatgcccttttcctcgccgcggctgtgctgctcctcgatggtgggaagaccgccgatgccgctggacacgatgacgccgatgttctcggcctcggcttcgcagtcgatgccgctgtcctggatggcctcagcggcagcgcccagcgccagcagggtgaagcgggccatcttgcgggcttcctttttatccacgacggtctcggggtcgaagcccttgacctcgcctgccagcttgcacttgaactcgctggtgtcgaactgggtgatggggccgatgccgcacttgcctgcgcgggctgcggcccagctgtcggcggtgttatttccaagagggttcacggtgccaagaccggtgatgacgactctgcgtttttccatagaaaaagctcctttttacattgccatgccgccgtccacacagagcacctgcccggtgagatagctgctttgttcggcggcgaagaaagccaccgcgtttgccacgtcctccggctggccggcgcgtccctccgggatggtcttgcacatctcggtgcggacagcctccggcagagcggcggtcatatccgtggcgatgaagccgggggccaccgcgttgacggtgacgttccggctggccagctccttggcgaggctcttggtcaggccgatgaggcccgccttgctggcggaatagttggtctggcctgcgttgccccgcagacccaccacgctgctcaggttgacgatgcggccatagcgctggcgcaccatccggcgtgcggcctccttgcagcagaggaacgcacccttgaggttggcgttcaggacggtatcaaagtcctcctcggaaaggcggaggatgaggttgtcgcgggtgacgcccgcgttgttgacgagaatatccacccggccaaaggcgttccctgcctcttcgaacagcttcttgcagccctcggcagtggagacgtcggcctgcacggtgacggcctcgacgccaagctctttgcacagtgcggcagtctcggcggcagcggcctcgccgtggcagtagttgaccaccacattgcagccctgctttgccagtgcgacacagacagcccggccgatgccccggcttccgccggtgacgacggcggcacgggtcagcttttcttcgctcatgcctgtgcctccttccagctggtgaggaaagcttccagctcttctgccgtctcgacagcggtgcagtggacgtctgtgcccagcgtcttcttcacgaagccgctcagggccttgcccgggccgacttcgagaatgtcggtgacgcccagctcgcccagacggcggagggtatcttccatgtagacgctgctctgcacctgcttttccagcagagcggggatgctgtcgctgtctgccttttcgcggccgaggcagttgaagaggacaggcgtctccatctcgccgaaatgctcagacgcaaagcgctttgccagcgcgtcaccggcggggtgcatcagcctggtgtggaaggggccgctgaccttcagcgggatacagcggcgtgcgcctgcggcttttgccagctcagcggccttttccacggcggctttttcgccgccgatgaccagctggcccgggcagttgtaattgcagatctggacacagcccagagcggacgcctcttcgcagcactttgccagtgcgtcgcggtcaaggttcatcacagcggtcatgccgcactcgatgcccttggcggcgtcggccatggccttgccacggaaggaggccagctccacagcctgcttggccgtgaagacaccggcggcttccagcgcggagtattcgcccagcgacagaccggccagatcgtcggccttgacgccgttttccttcaggacagccgtgacaccggcggcgaaggccaccatgcagggctgggtgtactgagtcagattcaaaacgccttccgggtcatcgaagcagacgctctccaaatcaaagtcaaggtctgcggcgttgaacgcctcccggaacgcggggtatctctcgtaaaggtctttgcccatgccggggtgctgagagccctgaccggcatacagaatggcaagcttcattggtgtttcctccaatcatccatcagttcatccatcagctcccggacactgcgcatccggtcgagacggcccacgttggccccgcagaagaagagtccctcttccacattgcccttcacggcctcgatgagggcgtgggtgatgcagtaaggcaccttggccggctcacaggctttgagacagcgggcgcagtgcttcggcgggaagcgcagaccctgctcaagcttctgcaccagcggagtggccagcgcacggcccggcattcccacagggctgtggatgatgcgcacatcttcgggcttggccgccagcaggacatctttataggtctggctggcgtcgcactcgtaggtggggatgaagcgggtggcgagctgtgcgcccgcagcacccatcttcgtatagtgggcgatgtcctcgcccgtgtagacacctccggccacgaagaccgggatgtcgtggccgaactgagcctcgaaaggcttcacctcggccagcacttcgggcaggatctcgtcgagagtctggcattttccggccagaagctcttcttccgaaaagcccagatgcccaccagccttgcagccctcgatgaccacgaagtcggcggtgcggttgaaggcttttgcccaccggcggaggatgagctttgcagcacgtccgctggacacgatgggtgccagcgcaacatccgctttttccaccaggccgggcagctccagcgggaggcccgcacccgatacgatggcatccacgcctgcctccacagcagtgcggacggcgtcggcgtagttctgggtggcgaccatcgcgttgatggccaccagtcccgcgccgcctgcgatctctttcgctttggcgatttcttttttcagcgcacggagattcgctgcgtaagggtcgcgggcaaagtcgggttcgcggtagcctgtgtcggcggtggagatgcaccccatgccgccgcaggccgcgaccgcaccggccagcccgccgagggagacgcccacgcccatgccgccctgtaagacaggcacggccagcggcttgcctgcgagggtcagcataactcgctcagcgaatgcatccgctgcctcccgctctcccacagctcgtcgaggatctcagccacaggccgcacctcgtggagcataccggccacctgaccggccatcagactgccggtggcggtatcgccctcaaagacggcgcgccgcagactgcccagcgtgtatttttccagctccatcttgtcggcgccggccttttcctgccggacatactcgcggctcatccggtttttcagcacacggacgggggtgccgccgatgcggccggtgacgatggtgtcgctgtccttggcgcgcagaagcgcggccttgtagttctcgtggacggggcattcctcactgaccagcaggcaggtacccacctgcacaccgcaggcacccagtgcgaaggctgccgccagctgacggccatcggcgatgccgcccgccgcgatgacggggacatctacagcgtccaccacctgcgggacaagggccatggtggtcatctcgcctacatgtccgccgctctcggtgccttcggcgatgacggcatccacgcccagaggggcaaggtgcttagccagaacggccgctgccaccacggggatgaccttgataccggcttccttccacatggggatgtacttgccggggttgcctgcgccggtggtgacgaccttgacgccctcttccacgacgatcttcgcaaactcgtcggcctgagggtgcatcagcatgatgttgacgccgaaaggcttgtcggtgagctccttgcagcggcggatgttctcccgcagcgtctcagcgttcatgccgcctgcgccgataaggcccagcgcaccggcgttggagcaggcagcggcaaactcgccggtggcgatgttggccatgccgccctgaatgatggggtatttcgtgcctaatatctcgttgagtaatttcatatcgtttccttcgtccaacctctccgtaaaggctctccctttgggagagctggcgcgcagcgcctgagagggcaagcccgctgaccaaaaaacgtcagcatcttgatagtatcccttttccaaagagtctgcttatcgctgtgcggcggttttatctttaccagccttgccctctccgtcaccttcggtgacacctctcccaaagggagaggctttataagtaaccagcatcccgccccaggtcaatccgccgccgaagccgatgcaggataccttctgcccggctttgagcagaccggcttcggccatctcgttgagggccaccgggatgctggccgcgctggtgttgccgtggcggtccatgttcttgtagaactttgcggcgtcggcgtggagcgctttcacacagtggtcgatgatgcggctgttggcctgatggcagaccacccagtccacatcgtccagcgccagctgcgtctcgtccagcaccgcgtgcagacagcggggcagcgcgtccaccgcaaagcggaagacagcacgcccgtccatgctgatgggggccgaaccggtgcggcaggggcctcctgcgtggatagcctcgtcgccccgtgcacccagcgtgatcgcaaacggtgcgttgcacagttcaaaaatcgctgcgcccgcaccgtcgccgaagagcacacaggtagagcggtcggtctggtccatcaggcgggacagcgcttcgcagcccaccacgagggcgtaccgtccgcccagcgtcgccatcaggccgcgggccacggcggtgccgtagatgaagcccgagcaggcggcgttgacatccagcgcagggcggttttcgggcagacccagcgcccgctgcacctgacaggccacacttggggtggcgtcaggggccgaaagggtggcgcagacacagcaggcaatatcctgcggcgaaagaccactgcgctccagcgcctgctttgccgccgcgatggccagcgtggcggcggattcttcctccgtacaccagtggcgggcgcggatgccggtgcgggtggtgatccactcgtcgctggtgtccacggtgcggctcaactcttcattggtgaccgtgcggccgggcagagctccgccggtggcgatcaactgcaaaccgttcatgctcgtttcgcttctccgatctgacgaaattttttgtaccgctggtcggccagtgccttgccgctcatcttgcagagggcggtgaggtggtttttcagggccgtatccatggcggcaaacagggccgcgtggctgcgctgtgcgccgcccacaggctccgggatgatctcctcgacgatgccgtccttgtagaggtcctgtgcggtcagcttcatgatctcgcaggcttcgccgctgcgggaggaatccttccacaggatgctggcgaaaccctcagggctgagcaccgagtagacggcattttccagcatgaggatgtggtttgccacacccagcgccagtgcgccgccggaagagccctcgccggtgacgacagcgatgacgggaaccgtcaggccgctcatctccatcaggtttcgggcgatagcctcgccctgtccccgctcttcggcctccttgccggggtatgcgcccggcgtgtcgatgaaggtgatgatggggcggccaaacttttcggcctgcttcatgagacgaagggccttgcgatagccctccggtcccggcataccgaagttgcaggccatgttctcttccagcgtggaacctttgcggtggccgatgacggtcacaggcatcccgtggaagcgggcgatgccgcccaggatggcgctgtcctcccggcactgacgatcgccgcactgctcaaagaaatcggtgaacagggcgttgatggtctcgtcgatgtgggggcgctcgggatggcgggccagaaagacccggtcctcggcggtcagcgggccgcagcagcggaggatctcatcttcctccacggccagttcggccagctcagaggcgtgggccgtgatagcggccatctggctctcctcgtcctgtgcgccgccacgcagggcagcgatctgggcgtccaaaggagcaagctgctccagaagttcttttatcattccgttttcctcccgcctgcgtggagctgcagcagctggatgagggtggcgcggagctcactgcgggggacgaccttgtctacaaagccgtgttccagctggaactcgctgcgctggaagccctcgggcaggcgctcgccgatggtctgctcgatgacgcgggggcctgcaaaaccgatgagtgcgcccggctcggccagcatgatgtcgccaaggctggcaaagctggcggtaacgccgccggtcgtggggtgggtcaacacactgatgtacagcccgcccttggccgaaaagcgctcgatggcggcgctggtcttggccatctgcatcaggctgaaaatgccctcctgcatccgggcgccgccgctggccgaaaagatgaccagcggcagttttttcgccgccgcgtactcgatggcgcgggtgatcttctcgcccacggccgtgctcatgctgcccataaagaagcggctgtccagcacagcagccaccaccgacacgccgccgatgcggcccactgccgcgacagcggcctcgctgaggcccgtcttctgggtctgggcgctgagcttttcgggatagcccgggaaacccagcacgtcctgcggggccagctctgcgtccagctcccggaaactgccgctgtccagcacaaggctcaggcggtagtacgcgccgatgggctggtgattgccgcagttggggcagacgaagaggctcttggcccagatctggcgggtggcacggcggccgcactgcttgcattccacaaactgcggctcatgccacgccacaccggtgtcccgccgggctttgagctggaaggtacgctcccgcatccggcccgggagcaggtctctgatgtcgttcatcgttatgcctcagcgtgtgcggtcaggtagttgaagatgtcgccgacggtcttcatgttggccagctcctcgtcggggatggagacaccgaaagcgtcctccagagccatgttcagctccacagcgtccaggctgtcggcctcgaggtcctcggtcaggctggcctccatcgtgaccttctcctcctcgcagttcagggtgtcaacgacgatcttcttcatatcctcaaaagtcatggtgattttctccttttatcttgtgtatgtgtgttgtactatcgtatcttgttcgggcaaatcagttcatgtcatttagttaaatgttttgaacgatttgataaggccattatactcgcgaggccaccattgtcaatagttttatctaaaaagttttagttttctcatttctttcacaggtcgttgcgcaaccaatacaatattttcgtcgtgtatttcgggctttttgtagtttttcccggcccctgtgcgatactcggcccggaaacgctgatagatacagaataaaaagagcagagacttgcgggttttcaccgcaggctctgctcttttgggttacaccgttatctcgatttgatttccttccaccgcaaggacacagctttcataatagccgtctccggtggtgcgggggccgctgaggacttcgaggccgtcggccttgagacgggccgtcagcacatccaccttctcccgactgccgacgctgaacgcgatatgcgcgtatccggtacgggcggcaggcttcggctcgtcggccataccaggtttgttcatcagctccaggcgtgcgccgtctgcgaaagtgagaaagtaggagcggaagtccgtcctcgggttgtggtagccctcgttcggcatagcgtcgaggtagcggacgaagaagtcctttgcggcttcgaggtcgttgacatataacgcaacgtgttcgattttcattgtgtcaccttcttatgtcttaccagatagtatccgatgccgatgacatccgccagcgccatgcccgcaatgaggacgaaggactggaagacgctctggcgcattttatcgtactcaccactgccgtactgcatcgagatggccgcgccgctgcccatgcagaggcccagcaggatgctgccggtgatggggccggatgtcaatgtacgccgcatggggtagatttctcctttttcacatctcaacaaaatttcatacggtattctttgggagtgcaatgttttatctcccggaagatcttgataaagtagctgccatcggtgaagccgcactccgcgccgatctcgccggtcttgagccgggtggagcgaagcagctcagcggccttttccacccggtactgcttgacgtactggatgggcgtgatgcccagcatctgcctgaaactgcgcagacaggcgctctcgctgagggccacgctgcccgcgatgagctggactgtcagctcttccgcgtagtgttcctccacgaagcggagcatctgcttcatccgctcggaggcgatctgctcctgctgggagactttcgtccgcccgcccacgcactgggtgctcagcagccgcagggccagcgagaggtagtagcgcacccggttctcgtagtcgaagggttcgtccgacacggccttccagctctcgtgcagacagtccagcacctgtttctgccacggcaccaacccatccagaaggaaaaatggcggggcgtcgggctgggtcatggggcggatgagcttctgccagaagatggtgtccatgccgcccacaaggcgcggatggaacacgcccgagtggagcagggccgtgccttccggtgcctgctccaccgcgtggaggacgcccgagttgatgaacactccctgcccggtctgcaaggtgaggcgggtcttgttgacgtccacatggagcggtcccttcgtgcagagcacatattcaaactcttcgtgccagtgccacgccaccgaatagctggacagatcctcggcatagcaggcgatgggaaacagcgcgctgccgtgctgcacaagttccctgcccttttcgctggcgacgatgttgaagctgatatttagtgccatattcgccaattcctttccccaatacattgaagattttttatcaaagccgattttgttgtacaaagtatgtgtttttgttctatcatttgtgccgatttcgtggtattatttcatcggagccgataagctcagtatagcactgaaacggggcagatacaacccacaacgaagctttgcttccaagggtcttgcgcactgtcccacagctccaaggccgcgatgccgcctgcaccccgacccacaaggcttttgcagaagccttacacactttaccgaacacggaggtatttattatgcttcgcatcgaatattttgataaaaaccgcttcatgaaacaggtcgccgcaagccgcggcagcgtcatcctgcacctggacaatggctccacctgcgacctcaagaaggacaatgaggcttccgccatcttccagaccctggacgctcccaagaagggcttcagcatcagcgtgagcgaccccgctgatgtcaccggcttcctgcgctatatgctcgaggctggccgcgcctgctgaaaacgccatcatccattcttcattattcatcatcacagcaaaacgggacagccccgctctggcacatctcagagcggggctgtcccgttttgttgcatttttattttacaggatgcaccggctgatggcctgcgccacagccagcagctcttcctgcccgatgaagccgaacttcatctcgtgctcgtcggcgtagcagaccgtcagttccgaagtctgcaatgggtcgccgaagcctgccgtctggatgccgaagtggacgatcttccggtagggcaggacgaagatctcctgccgggtgccggtaacgccctgcatatccaccatgaaaatgcggtggctcgtaaaaacggcctgatcgcgcaccgtcttgtatgcgcccacgatgctttcgccgtccagcaaaagcgcctgcacattcttgcagatctccttctccttgatgcggataaggttctgcatcggcttttcccgaaattccataccggagtctcccttcttttgccctatataataggtgtttctgggccaagtatagcatttctgccacagagcttcaagtcattctcgccttttgggccgggttgtgttatactgacaggtgatttgagatttcttgtatacaaaaaagaggttcacctatggagatcatcgtacatcaggccattctccacgttctggataccacgctggatgcccccgtgctcagcggcagctgcatggagatgacagccgaaaagacggcctatctgcaataccacatcgaaaagctgcttgccagcgacgacatccgccagtgccgccccctgccggactcggcgttccggtatgagctggaacagaacaaggactttatcgacctgtcctgccgcatcgcgggcgtgttgttcgactatatgcacgctcataccaccattccgggggccgacctcgctgtggtggacttcacccgggacggccagccgtggctgggcatcctcaagctcaactataaaaacggctacacccactacaccgagagcgtagacggtgcgccggtcaactccatcatccagcagcgggcctgcctgcccacccagagcggcaaggtggaggaaggcgcactggtggacctgaccgactactccatgaagctgctggagaaaaagttcgacatcgacggccacaaggagttttacctctccaccgtcgttttccagtacaccaccgccgagccggaaaagaaaaagctgcaggccattcaggacgccgccgtccaggccgtgcaggagaactaccaggacgagccccacgtggaggcacaggtggccatgctcattgccaatcaggccgctgacaacgacaacaaggtgacggtcgagcaggtgcgccggcagcttgctgaggaatacccgctggcggctgtccccttcgacgactatgtggagaaaagcgacgtcctcgagccgacgcaggcccagcagcccgtcactgtctcccccgcccgcatccgccggatggagagccgcagcatccacaccgccagcggcatcgaggtaaagatccctaccgagatcctctccgaggattctgcggtggaatttctccacgccgaggacggcagtgtttcgctgctcatcaagaacgtcatcctgtaaggaggggagcttattatggaccttgctgtcatcaccgcccagcaggtggcggaactgttcatcctcataggactgggtgctcttggtgccaagaccggcctgctccgccccgagggcaagcagaccctctcgaacctgctggtcaacctcgtcgtcccagccatgatcatcaactcctaccgcatggagttcagcgcagaaattctgcacaacctcatggccgcgttcgccctgagcaccctgtccatcctgctgggactcatcatcaccctgctgttcacggcccgcagcagggacagccggacgcccatcttccggttcgcctgtgtcttctccaatgcgggctacatgggcctgcccctcatttcggcgctcttcggctccgagggcctgctttatgccagcgccttctttaccatgttcaatctcctgctttggacggtgggctacagcatggtcagcggcagctccgaccccaaaaaggtcgcccagagcctgctgcactgcccggccatctacgccatcgtcgtgggtctcgtcctctacctgctccagatcccgctgcccgacctcatcgtccagcccatggagcttctgggcgacatgaacactcccctctccatgctcatcaccggtatgctcatcgcctcgggcgacctgcaccgcaccctcaccgatcagcacatctggaagctcaccgtagtccggatgcttttcattccggtgctgaccatcgcagctttcgccgcgctggggctcttccgctacggcatggtcacgcaggtcatcgtgctgctggaatgctgccccgccgcgtccatcacctcggtgttcgccgtccagttccaccacgatgagcagtttgccgccggcagcgtcgtgctgaccaccctgctcagcatcctgttcctgccgctgtgtgcgctcatcattacgatgttctgaggagtaaaaatcatgtccgatattaccatccgcaacgccacattggccgacgcaccccgcattctggagatctacgcctactacgtcgagcacacggtcatcactttcgagtacgatgtgccgtcgcttgccgagttcgagggccggatgcgggccatcatgcagaagtacccctatctcgtcattgagcgggatggccgcatcgagggctacgcctatgctcacgcctttgtaggacgtgccgcctacgactgggccgcagagctgaccatctacctcgaccacgacgccaggcgcggcggactgggccgcgccctctatgaggcgctggccgaccggctcaaggccatgggtgtcctcaacctctacgcctgcatcggctacccgctggtggaggacgaatacctcaccaaaaacagcgcccagttccacgagcatctgggcttcacgctggccggtaccttccacaactgcggctataagttcgggcgctggtacgacatgatctggatggaaaaaatcatcggcgagcaccgccccgaccagccggacatcgtgccgtatcaatattgagcctatgcaaaaaagcaggtgcatcatgcgatgcacctgcttttgctttactgtttatccatttgttctttgtggtattgcagcgtgtacagctgataataccggccatgtgcggcgagaagctgctggtgagttccctgctccaagatcctgcctcgcgacagcacgatgatgttatctgcgtgctggatggtggagaggcggtgtgccacgatgagcatggtgccgacgctgcgcatcttttccagcgaatcctgaatcagaagctccgtctcagtgtcgatgttggcggtggcctcgtccaggatcatgacgctgggcttatgcaggatggtgcgggcaaagctgagcagctggcgctggcccgccgagaagttattgccgcgctcccggacttcttcgtcgaggccgtgctcgagtttgttgatgaagtggtcggcattgacataccgacagaccttcatgatttcttcgtccggaatgttctcctcccggaggacgatgttgctgcggatggtacccgagaagaggaaaacgtcctgcagcatctggccgaagtgacggcggagggaggagatcttgattttgcggatgtcgatgccgtcgatcaagatctcgcccttctggaactcgtagttgcggcagatgagggagaggatggtgctcttgcccgagccggtagagccgacgaaggccacggtctggcggggctccacatggaaggaaacgccctgcagcacccactcgccggggatgtagctgaaccagacgtcccggaactcgatgtcgcccttcacttcgtccagctcaacggcatcgggggcgtccaccatctggggctggatgtccatgatggagaagaccttctccgacgacgccagcgccgactgcagccagttgaactgctcggcgaggttctggatgggggtgaagaacttggagatatacatataaaaggtgacgatggtgccgctggaaatggtctgcccgaggaaggtgacatggttcagatggcccatgccgccaagatagaacaggcagaggatcgagctgatatacagcatatacaccagcggacggaagacgccgaagacgaagatctgctcctgcgtggccttggcgagggtctggctcttctggcggaactcctccatcttctcgtcctcgcggccaaagatctgggtgactttgatgccggagagattctcggagaggtaggtgttgatgtcggtggtcgcgtccttgaccttgcggtaagcgcggcgggagaacttgcggaagatgaccgtgaacaggaggatgaagggtacgaagcagagcaccatcagggtcagctcgtagttcaggaagagcatcgccaccagaatgcccaaaatgacgaaggcgttcttggtgaggttgacgaagaggttcgtgaacatcatcgagatggcgttggtgtcgttggtcacgcgggtgacgagcttgcccaccgggatgtcgttcagctggccgtgggagaggctttcaatgtgggtaaaaaggtcttcgcgcaaatcggagatgatgcgctggcccacacgctgcagaatgacagcctgcaaataggtgctggccatcgagaagaccagcacacccgcgtacacggccacactgacatagaggcttttcagttcgaaatcgcccaccacaagttcttcgatgtagcccacgatgaggggcgacgcgatgtcgtaggagatggagaagaggacgaggaagcccacgacgacgaactgcctgaggtagggtttggcgtagccgaagaggcggcgcaggatctcgccgtcggccatgctgcgctcgaagcccatagccgttttcttgtctttgacgcaggcgtaggcgatgagcagcagcaccgacacggtgccgataacgccgcccacgagaagaagcggattcagactcatcatgcgttgccacctcccacttcgtcttcaagcttctgcagatcgaccattttgtggtactccgggcaggatgcatagagccggtcgtgggggccgacggcctccactctgccatcctcaaggaagatgatcttatccagtccctccaccgtcgagatgcggtgcgcgatgagcagagtggtcttgcctgcacggctctttttcaggttgtcgaggataattttttccgtcctggtatccaccgccgaaaccgagtcgtcgaggatcaggatgggcgcatctttcagcagggcgcgggcgatggagatgcgctgcttctgaccgcccgagacggtgacgccgcgctcgcccaggacagtctcgtagccatccttgaagtccacaatgttatcccggacgtcagcaaggctggctgcccgttcaatgtcctcaggggtggcgtcatccacgccaaag

SEQ ID NO: 1134 - DNA, 9164 bp, unidentified
  source 1..9164: mol_type = unassigned DNA
tcatttttcatcaacaacctggaagatgtagaatttcagataatagctctcctgcgcctcccacagtattgggtggtcaggtgactgtgtcctgaactcgacctgacggagtcttttatgtacagctttagcggcttccttaatagtcttggtaagaagctcctgtgtcatgaagtgtgagcatgaacagcttgcaagatagccgccgtctttgacaagcttaagtcccttcatattgatttccctgtagcccttgattgcgttctttgtagcttccctcgatttggtaaatgccggcgggtcaagtattacaacgtcatatttctcacctgcttcgttaagctttggcagctcatccaatacatttgcacatttaaaatgtactgtattctcaagtccgttaagcttggcattggctctcgcctgttcaacagcatattctgatatatcaagtccagtaacttccttagcacctgcaattcctgcatttaatgcaaatgtacccatatgggtaaaacagtctaatacccgcttgtccttgcacagcttctgcattgcaagtctgttgtacttctgatcaagaaagaacccggttttctgtccattcacaacatctatcatgtagtggacaccattctcaactatctcaacattagtgtcaaattcatcaccaataaagcccttaactctctccatcccttcaagagtacggactttggcatcgcttctttcatatactccacggatatcaatgcctttttcatgaaggatttccttcactttttcgacaataagtgacttaaatctgtcaatacctaaagcaagcgattccacaacaagcacatctgagtacttatctataacaagccccggcagaaaatctgcctccccgaatataagacggcaggcagaggtatctactgtgtcaaatctgtattcaaccgcagcccttactctctcctcaataaatgcctcatcaacaacatcagtgtgtcttgcaagcattcttactgtaatcttggattttctgttaataaatccgattcccatgaaataatcatcaaaatcaagcacctcaacaagatgtccgtcaattattccgtcagacatccattcaatttcattatcatatatccaggcaccgcctgcctttaatgttcttccttcaccttttcttaatcgtatctttccgcatacgctgaataaatcttccattctgttccttcctgccagatttttctgacatttatcataattattcataatatattaattcgttgacggattaccaagaaaataaaacatacatactcctgcaaccgtaataagaagcgacacgagcttaatccatgaaaatgtagtcttctcacttccaaacagcccgaaaagtcccagcagatacgaaacaattatctgcgcaactacaatcgtaacctccgctttagcaattccaagaccacttatactttttataactgtaaatgttataaatgcacctatcacacctccaagaagtgtaatcttgttatcaaccttaaacaacttcatgatatcaggtcttccgtcaattacccacataatcgcacaagtcgccagtgctgtcaactgcacaaacattgccgtaacccacacactgcttgcttttgtaacatttgtattaaatgcgccctgtaaactcataagtgtgcctgatattattgcaatcaaaaatcctgccattaactaacctccccattaatctgcatagaataattattagttaataacaggatatttattcataatattatttagtactctgcgtactgttttcattattatttttagttgttttttctattgttgttgcaaatgtactgtaagctgtatcaacatttccaccatcatatacctgatgaagcataatctcatatctcatgtatacttctccaacaccgatatatttggcttttacaacagagtcagaataaatctggtgtaacttctggtagctttctgctctcttaacctttaaatccgcccttgcacagcttttcttagccatgcttccaagataatctgcataatcataagaaattgctcttgcaacagccttggatgcatctacattcttagtgtacggattaactactgccatcgtagtaacagacattgccttagaatcaaggtcatctcccattgaaggatactcacatattccataatctacatctgtaacattaatctctgcaagactgtctgcatctagcaccgtatagagcatatttccagtagaaaacagatccgcacattctttaagacttactgtatttctgtcaataccaaatgcatcttttaactgagcgtacttagtaagaaccttcttaatcttttcctcattaagagatacctcagccctgttctctgcattaactccgcctatattaatataggctcctgctgctgcataattaaggaacattgaatcaggatcccattcaaacaccattgaaacatcctggttctcatctgtaatctgataattatcacttatattacgaatctggtctatagtatcaactgcttctgcatatttcttattatatacaagaaatgaagtgttgaacgacaccgggtaaccatataacttaccaccatacgaacatgcagtcattgcagccttaccatacacattctcattatagacttcaggatacatatcattctcagaggtaagacctgaaagataagccttctccatctcttcagatgtcagaaaatatatatcacatgcattgttattccttaccgattcgtcatatatataattaatatatgaatccgcctcaatatatactggcttaacagtcaccagttcattagatttcttaaactgtctggcaacgagttcaagataagactcatatgcgctgtcattataccagacattaactgtaataggtccactaagattaagcttcttcgcagcctgtgtcctgtcatctttattaccacagcctgcaaagactgtcagcatggtaacaatcagcatcatactgataaatcttcttaatttcataaagtaaactcctgattctagaaggatttcttaagcttagctatgcattcatctacatctgccttagtaattacaagtggtggaacaaatcttataacattagttcctgctgagaacagaataagtccgttatcaagtgctttggcaattacgtccttaggattaactgataactcaagtccctgcataagacccattcctcgtctctcgacaacaacatctattgtctcaacaagctcatcaagcttttcttcaaagtaagcagatacttccttgacattatctaatacatgctgcttctcaaaaagttcgaacaccttggttgctgctgcacatgcaagtggattaccaccgtatgttgttccatggtctcctggaactaatgccttcgcaacttcctctgtcgctgcaaatgcacctacaggaactccacagccaagagccttggcaactgtaaggatatcaggcttaacgccatactgctggaatgcaaacatacttcctgttcttcccattccgcactgaatctcatcaagtataagaaggattcccttctcatcgcataactttcttacaccttcaataaattctttagtagcaggataaattcctccttcaccctgtactgtctcaaatattatagcacaagttttgtcattaacaagttcctttacactgtcaaggtcgttatactgtgcaaacttaattcccggtatcataggtccaaatgcttcctgataatgcttattaccagttactgcaagtgctcccatacttcttccatgaaatgaatgctgcattgcaataatctctgcatcagcctttccgttcttgacataataatatttctttgcaagcttgactgcaccttcaatagcctctgtaccactgttagtaaagaatactctgtccattcctgaagcctttgtaagtgctgttgcagcctctacagccggttcattatagaaataattagatgtgtgtataagcttatcaatctgtgcctttaatgcatcgttatattccttattgttataaccaagtgcaaatactgctatacctgctccaaaatcaagatattctttaccatctgtatcgtaaagtcttactccgtcacccttatcaagtactatctggtaacggttgtatgtatgaatcagcttctcttctgctgtttctataatctgctgtgtattcatgattactctcactttcctattcttatgagcacacattttcacatgagccaatataatattataacctcaaagcttacggttcgcaattatttatctgagtcaaagaatttttctgcatcgtctgaaagaatagctgtaccaacacccttgttagtaaatatttcaagaagaaggcagtgtggaattcttccatcaagaatatgtactcttgatacaccatgctcaatagcatctatacagttattaagcttaggaagcataccgccaccgattgttccgctctctaaaagtgttctcgcctctgaagtagaaagctcagatataagtgaatccttatcgtcaaaatccttatatacaccttcgatatctgttaagaatgcaagcttctcagcattgacagctcttgcaattgcacatgctgcgtcatctgcattaatattgtatgcatgaaaatcatcatcatatccgatagggcatattactgggaggaaatcgtccttaagcaaggattcaataagtgttgtgtcaacatctgtcacttcaccaacatatcctatatcctcacccttagaatacttcttctcaacctttaacatgccgccatccttaccactgataccgcatgccttgacaccaagctgctcaatcattgaaacaagactcttattaaccttgttaagaaccatctcggcaatctccattgttggctcgtctgtaactcttaaaccattcttgaattcaggtgtcatgcctgacttttcaacccatttgctgatttccttgccaccgccatgaacgatgattggcttaaaaccaacaagtttaagaagaactacgtcctgaataacttttctcttaagttcttcatctaccatggcacttccgccgtacttaactacaattatctttctgttaaatttctggatataaggaagtgcctcaacaagcacctgtgccttcataagttcctctgtcatatcttttgcgctcataataatctccatttcatatttattcagatatatttgctttaaaatgctgtgtcaggttagcttctgtaatcagcatttatcttgacataatcaaatgtaaggtcacagccccatgctgtagcgcttgcatcgccctgcttaacatccgcaatagcaattacaggattctgtgaaagtatttccgttgctttctcctcgctgtaatctgtagcagttccatctttaacaatctgaagctcacctgcttcactcttaaagaatatatcaactttttcagggtcaaagtcagcaccagaatatcccattgcacagagaattcttccccagttagcgtcatgtccgaatattgctgccttggtaagacttgatgtaacaattgacttagcaagtgtcttggcttctgccttagttgttgcaccctttacctgaacctcgaaaagacatgtgcagccttcgccgtcacctgcaatcatcttggaaagctctgtaaatacatagcttaagccttcatagaaagcattataatcagcaccctcttctgtaatcttcttattgccagccattccattagcaagaacaagagctgtatcattagttgatgtatctccatcaactgatatcatgttaaatgaatcatcaacaattgcacttgtcatcttctgaagaagtgccttgtcgatatcacagtctgttgttatgtagcagagcattgttgccatgttaggatgaatcattcctgcgcccttgcacataccaccgattgttaccttagtacctgcaatctctacttctacagcaacctgcttgcttcttgtatctgtagtcataattgcctctgctgcctgtgttcctgcttctaatgaatcatcaagcattggagcaagcttttcaattcctgcacatattctgtcaacaggaagctgcattccgataacacctgttgaaccgataagtactgcattctctggtacattaagaacctttgcaactgcctttgcttcttctgcacatgcattatctccttcaacacctgtacatgcgttggcaacaccgctgtttacaactacagcctgtgcaaagtcttcattatatacaatgtttctgtcccatttgacaggagctgcaaatactttgttagttgtaaatgttcctgctgtaacacatggcttctcactgtatacaagtgccatatctttctttccgttcttatatttaatctgtgcttcacatccggcagccttgaatcctttagctgctgtaacaccgcctttaattatattcataatatcctcctattgtaccatcacatatactctgtcatcgtgcatatttcgtcgtgtaaattctgaatttatgctacatttattatggaaacattggtgcaagctgtaatccctcattctctggaagtccgaagagaaggttcatattctgtactgcctgacctgctgcacccttaacaagattatctaacgcacccatcattataagtctgttagttcttggctcaatcttaaatcctatatcaacaaagttgcttccctcaacccagcgtgtttcagggcatacatctttaggaagtactcttacaaaatattccttatcatagtacttgtcatatgctgccttaacatcttcatatgtaacatctttggcaaggttggcgtatgctgttacaagaattcctctgttcattggaaccaaatgtggtgtgaagataagctttaaattatctcttccacatgcataacctaactgttcctcaatctcaggtgtatgtctgtgagttcctacgccatatgccttcatgctttcattaacttcgcagaaaaggttggcaaccttagcgccacgtcctgcacctgaagttccactcttagcatcaattataattgtatccggattgattattccttccttaaccattgggtaaagtgtaagaattgatgttgttgtataacagcccgggttagcaatgattcttgtatctttgctcaccttgtctctgttaatctcacataagccataaacagcttcatcaatatactgtggtgctttatgctcaagcttataccactgttcatatacattaacatccttaagtctgaaatcagcactcagatcaataatcttagtctttgaaagaatttcgtcattaacaagtgatgcacataagccctgtggtgttgctgtaaatataacatcaacctcgttagcaagctgctccatattgtcgtccatacattttgcatctacaagcttaaacatgtttctatatacatctgaataattctgatctatgtaacttctcgaaccgagccatacaatctctgcatccttatgtcctaataataatctgacaagctcgttacctgcgtaacctgtcgcaccgataatgcctactttaatcataactcctccttgttttgcgaagcaaaatgcatatattcaacatttatgcataaaataacgcaaaatgtaaattgataacctacattatagcaactttttttcttatgtaaaggatattttaaagaaaattcatatttatacatttttgttgtatattaatgtataatatgcataatttgttgttgcatttttaaataaagtagtttattataatctgcaggtgcatagcatatgtgttttactatgtaaacttaataatatacggaggaatatataatgaaagaaaaagttattcttgcttattctggcggacttgacacaactgccatcatcccttggttaaaggaaacatacaactatgatgttgtctgcgtatgtgcagactgtggtcaggaagaggagttggacggacttgagcagagagctctctcatgtggtgctgctaagttatatatagaagatatcactgatgagttctgcgacaactacatcgttccatgtgttcaggcacacgctgtttatgaaaataaatatttacttggtacttcaatggcaagacctcttatcgctaagagacttgttgagattgcccgtaaggaaggtgctgttgctatctgccatggtgctactggtaagggtaatgaccagatcagattcgagcttacaatcaaggctttagctccagatatcaagattatcgctccttggagagattctaactggaagcttcagtctcgtgaggatgagattgaatactgcagacagcatggtattcatcttccattcagcacagactgcagctacagccgtgaccgtaacatctggcatatcagccatgaaggtcttgagcttgaagatccagctaatgagcctaactacaagcatttattagttcttggatgcactcctgaggaagctccggatgaaccagaatatgttactatgacatttgaaaaaggtgttccaaagtcagttaatggcaaggctatgaaggtttctgatattatcagagagcttaacagacttggtgccaagcatggtatcggtatcattgatatcgttgagaaccgtgttgttggtatgaagtcccgtggtgtatatgagactcctggtggaacaattctttacgaagctcatcagcagcttgaggaattagttctcgacagagatacaacaacattcaagatggatgttggaaacaagtttgcacaggttgtttacgaaggaaagtgggagacacctcttcgtgaagcacttcaggcattcgttgagaagactcaggaatatgtaacaggtgaagttaagttcagactttacaagggtaacatcatcaaggctggaacaacatctccatattcactttacaatgagtcaattgcatcattcaagacaggtgatatgtatgatcatcatgatgctgacggattcatcaacctcttcggtctttcacttaaggtaagagctatgaagaagcttgagaatgagaagaagaacaataagtaa

SEQ ID NO: 1135 - DNA, 12126 bp, unidentified
  source 1..12126: mol_type = unassigned DNA
cacgccgatggtactgcgtaacagtgggagagtaggtagccgccgtttttaagaagcctcgcttgtctattggacgggcgaggctttctgttttttattactttggtatttatatcgccgtttttaacagatacaaacctcataatacctattaaaaaagtgaatatttactgataatttgtatgttatgaggatatttatttgtatctttgtcgcccgaattgtaagctaacgatttaaaaaagagagaagctttgggaaagtttgataaatacaaaattgacttgaaaggaatgcaaacagactctgctaagtatgagtttgtattggataacctttacttcgctcacattgatggtcctgaagttcagaaaggaaaggtgaatgttacattgaccgtgaaaagaacctctcgtgctttcgagctgagttttcagactgagggaatggtatcagtaccatgtgaccgttgtctggatgatatggagctacctatcagttcttctgataaactgatggtaaagtttggacatgaatatgcagaagaaggtgacaacctgattgtgattcccgaggaagaaggggaaatcaacgttgcatggttcatgtatgagtttgttgcgctctctgtacccatgaagcatgtacatgctcccggtaagtgcaataaagcgatgactggtaaattgaacaagcatttgaaaacaaatgcgaatgaggatagcgatgatactttcgacacaggtggagatgacatcgtaattgaggaagaagtggaggaacaaattgatccccgctggaatgaattaaaaaaaatattagataataattaaagttttaagaaaatggcacatcctaagagaagacaatcaagtacgagacaagcgaagagaagaactcatgataaggcagtagctcctacattggctatttgtccgaattgcggtgaatggcacgtttaccacactgtatgtggtgcttgtggctattacagaggcaagctcgctattgagaaagaagcagctgtataattagtacagttatactgaaaacagcctgggggtgaaactctccggctgctttaagtattatagtattgctaatttaaaataggtttgatggaaaaaataaatgcagtaatcacaggagtcggcgggtacgtacccgattatatcttgactaacgacgagatatcaaaaatggtggataccaacgacgaatggattatgactcgtatcggagtaaaggaaagacatattctgaatgaggaaggattaggtagttcatacatggcacgcaaagctgccaaacagttgatgaagaagactggtgctaatcctgatgatatcgatttggttgttgttgctaccactactcctgactatcacttcccttctacagcttctattctttgtgataaactcggactaaagaatgcttttgccttcgacttgcaggctgcttgtagcggattcctgtatttgatggagacagctgctaatttcatccgttcgggaagatataagaaaattatcattgtcggtgccgataagatgtcgtcaatggttaactatacagatcgtgctacatgccctattttcggtgacggtgctgctgcctttatggtggagcccactacggaagattacggaatcatggattcgatactgagaacagatggcaaaggtttgcctttcctccacatgaaagctggtggttcggtttgtcctccgtcttatttcacagtagacaataaaatgcactatctgtttcaggaaggaagaacagtatttaaatatgctgtatccaacatgtcggatgtctctgctgcaatcgcagaaaagaatggtctgacgaaagatagtatcaactggattgttccgcatcaggcgaatgtccgtattatcgaggctgtggctcaccgtatggatgtgccaatggataaagtgttggtaaatattgagcattacggtaacacgagtgccgctacacttcctctgtgtatctgggattatgaagataaactcaagaaaggcgataacatcattttcactgcattcggtgccggatttacttggggtgcagtgtacgtgaaatggggttatgatggaaagaaggaatcgtaacgtaagttactgaattataacactcaaaaacgcatcctatttcgattcgatgcgtttttttgtctcaaccaataaaataaagagaaatgcataaagcaggttttgtaaacatcgtaggaaatccgaatgtcggaaagtcgacattgatgaatgtcttggtgggcgaacgtatttcgatcgctaccttcaaagcacagactactcgtcaccggattatgggaatctataatacggatgagatgcagattgttttttctgatactccgggtgtgttgaagcccaattataagctacaggagtctatgctgaatttttctacttcggcattgacggatgcggatatcttgctttatgtaacggacgtggtggagacgccggataagaataatgagtttatggaaaaggtgcgtcagatgacggtgcctgttctcttgctcatcaataagatagatcttacagatcaggaaaaactggtaaagctggtggaagaatggaaagagttgcttccccaagccgaaattattccgatttctgctacatcaaagttcaatgtagactatgtgatgaagcggatcaaagaactgctgcccgattctcctccttattttggaaaggatcagtggacggataagcctgcccgtttcttcgtgaatgagattatccgggaaaagattctgctctactacgataaagagattccctattcggtggaggttgtcgtggaagagtttaaggaagaaccgaagaagattcatattcgggcggtgattaacgtggaacgtgattcgcagaaaggaatcattatcggtaaacagggaaaggcgttgaagaaggtggctaccgaggctcgccgtgaactggaacgtttctttggaaagactattttcctcgaaacgtatgtgaaagtggataaggattggcgtagttcggataaggaactccgcaattttggttatcagttagattaagagtattcatgagactgtgatagtcgtgaaaaaacaaggtattgaactatgggtaatttagttgcaattgtaggacgcccgaatgtgggcaagtctaccttatttaaccgtctgacgaagactcgtcaggctattgtgaatgaagaagcgggtacaacccgcgacagacaatatggcaagtctgagtggctgggccgtgaattctctgtggttgacaccggtggatgggtggtcaactcggatgatgtctttgaagaggaaatccgtaagcaggtattattggctgtggaagaagcggatgtcattctgtttgtagtggatgtgatgaatggagtgactgacttggatatgcaggtagctgctattctgcgtcgcgctaatagtccggtgattatggttgccaataaaacggataatcacgatttgcaatataacgctcccgaattctataaactgggattgggcgatccgtattgcgtttctgccatgacaggaagtggtacgggtgatttgatggacttgattgtcagcaatttcaagaaagaatcatcagaaatcctggatgatgatattccccgttttgctgtggtagggcgtccgaacgccggaaagtcttccattgtaaatgcatttattggggaagaacgtaatatcgtaacagagattgccggaactacccgcgactctatctatactcgttacaataaattcggatttgatttttacctggtggatacagcgggtatccgtaagaaaaacaaggtaaatgaagacttggaatattattcagtcgttcgttcgattcgttctatcgaaggttcggatgtttgtattctgatgttggatgctacaagaggtgttgaggggcaggacttgaatatcttctctctgattcagaagaatcagaaaggtctggtagttgttataaataagtgggatttggtggaagataaatctgtgaaagtacagaaagcgtttgaggaagctgttcgctcgcgttttgctccgtttgtcgatttcccgatcatctttgcttctgcactgactaagcaacgtattctgaaagtgcttgaagaagcacgtagtgtgtatgagaaccggacgacaaagatcccgaccgcacgtttgaatgaagaaatgcttccgttgatcgaggcttatccgcctccttcaaataaaggtaagtatatcaaaattaaatatatcacacagttgccgaatacacaggtgccttcatttgtgtatttcgccaacttaccgcagtatgtgaaagagccatataaacgtttcctcgaaaataagatgcgtgagaaatggaatctgacaggtactccggttaatatttatattcgacagaaataaataaaaaagacacggattgtctcaattatatagaatatatagagagacaatccgtgtctttttataaatatatctctgtgagatcttgtattactttgtagtagacttatttttccaactggaaatcttttcggcgtaacacgaagctgttactcaagtatttttcacgtacaatctgattttccgataattcttccggtgttccctggaaaaggatctttccttcgaacagcagataggcgcggtctgtgatactaagcgtttcttgtacgttgtggtcggtaatcaggattccgatattcttgtctttcagtttccatacaatttgctggatatcttctacggcaatcgggtcgacaccggcaaaaggttcgtcaagcatgatgaatttggggtcgatggcaagacaacgggcaatctctgtacggcggcgctcacctcccgacaactggttacctttatttttgcgtaccttttgcagacggaactctgcaatcaggctttcgagtttctctttttgatattctttgggcttgttggtcatttccagtacagaggcgatattatcttccacgctcatctggcggaaaacggaagcttcctgtgcaaggtagccgattcccgtttgtgcgcgtttgtaaaccggatatttggtaatctccaggtcatcgaggaaaatacgtccttcattaggagtaatcagccctacagtcatatagaatgaagtcgtcttaccggcaccgttcggtcccagcaaacctacaatctcaccttgcttcacattgatggaaacgtggcttacaacggttcgtttaccgtacttcttaaccaggtcttccgtgcggagcaccatcttgctttcttccatattctagttattttgcggcaaatgtagtaaaaataagctgaaataatgtacatttgcagacaaatagtgtgagttatgataaaagcattgagaaccgtcgggagatatttcatgctgatgggtcggactttttcccgccccgaacgtatgcgtatgttcttccggcaataccttaacgagttggagcagctaggtgtgaactccatcggtattgtgctgttgatttcgtttttcatcggcgcagtgattaccatccagattaagttgaatatcgaaagtccatggatgccccgctggacagtgggatatgtgacacgtgaaattatgttgctggaattttcttcttccatcatgtgtttgattcttgccggaaaagtcgggtcgaatatcgcttcggaattaggaacgatgcgggtgacgcaacagattgatgcgctcgaaattatgggtatcaattcggcgaactacctgattttgcctaagattacggcgatggtgactgttattcctattctagtgacgtttagtatctttgccggaatcatcggtgccttttgcacgtgttggtttgccggggttatgaatgctgtcgatctcgaatatggtttgcagtatatgtttaacgaatggtttatctgggcgggtatcatcaaatccctcttttttgcgtttataattgcaagtgtgtccgctttcttcggatacacggtagagggaggttcgattgctgtaggaaaggcttctacggatgccgtagtatccagcagtgtattaattctgttttcagacttgatattaactaaacttttgatgggatgattgagattaaaggactttataaatcatttgatgacaagacagtattgagtgatattaatgctgactttgcaaatggaaagacaaacttgattatcggtcagagtggttccggtaagacggtgttgatgaaatgtattgtaggattgttaactccggagaaaggggaagtcttgtatgacggacgtaaccttgtgctgatggggaagaaggagaagaagatgcttcgcaaggaaatgggaatgattttccagagtgcggctctttttgactctatgaccgtatttgataatgtgatgtttccactgaatatgtttagcaacgatatcttgcgtgaccggattaaacgggcgatgttctgtctggatcgtgtgaatctgggggaagcgaaagataagtttccgggagaaatcagtggtggtatgcagaagcgtgtggctattgcgcgtgcgattgccttgaatccgcaatatctgttttgcgatgagccgaactcggggctggacccgaaaacgtcattggtgattgatgatctgattcatgatattacgcaggaatataacatgacgaccattatcaatacgcatgatatgaactctgtattgggaattggtgagaaggtgatttatatttatgagggacataaagagtgggaaggtacgaaagatgatatctttacttctactaatgaacgactgaataactttatctttgcttccgacttgctccgtaaggtgaaggacgtggaagtgcagggaatggaagggtaataaaaaaacttctgtcatcgggtgacagaagtttctttttttcttagctatgttagcgtcggcaattaagctctaggtctagcttctttaactaccattgtacggcccatgtattcagctccgttcaattcagcaatagcttttgcagctgcagcgtcgtcttccatttcgatgaaagcgaatcctttggatttaccggtttcacggtccataacaactttaactgatgatactgctccgtaatcttccatcacttgttgcagatctccttccttaacacggtagttaaggtttccaacataaatgttcataatgaaaatgataaaaaataaataaatgaataaaactctctggatagatggttactaataaaaagattaaaacgacagagagtttacaaatgcgttttggtaacggaagtaaaaaccttgtaatcaaatcgagaaactaatggtccatcaatccgcaacaaagaaaagaataatttttggattaaccatctttttggaaagttaatttgcggattatcagaaaaaaagtaggccgggggaacctggcggggtgggtgttgatggtgattttatcttgtttatagatggaatatcagtgaaatatcgataaaagatgtgtgaaagatgggtggcgttgctgaaataaatctgcaatgtcttttgaaatttgaaagattagcactaattttgcaccctctttgagtatagaacaaagtataaatcaaataaataattgtcagaatgaacgtttcattacaaaacattgacaaagtaagcgcagagcttactgtaaagcttgagaaagccgattatcaggagaaagtagacaaagagttgaagtcactccgtcagaaggcacagattccgggattccgtaaaggtatggttccgacaagtcttattaaaaagatgtatggtaagtcggtaattgcagaggttgtgaataaggcactgcaagaagctgtttacaattatattaaagaaaataaggtgaatatgttgggcgagccgttgcctaacgaagaaaagcaacagaatattgatttcgatacaatggaagaattcgatttcgtattcgacattgctttggcacctgaatttaaagcagaagtaagtgctaaagataaagtagattattatactatcgaagtttctgacgaaatgatcgacaaccaggtgaagatgtatactcaacgcactggcaagtatgataaggtagacgcttacgaagataatgatatgctgaaaggtctgctggcacagttggacgaagaaggcaacacaaaagaaggtggtatccaggtagaagctgcagtattgatgcctgcttacatgaagaacgacgatcagaaagctatttttgctaatgcaaaagtaaatgatgtattggtgttcaatccgaatgtggcttatgacggacatgctgctgaactgggttctttgttgaagattgacaaggaaattgcaaaagacgtgaagtctgatttcagcttccaggtagaagaaatcactcgttttgttccgggtgaattgactcaggaagtattcgaccaggcattcggcgaaggtgttgtgaagactgaagaagaattccgcgctaagattaaagaagaaatcgcagctagatttgtggctgacagcgattataaattcctgatcgacattcgcaaggtgatgatggaaaaagtaggtaaactggaattctctgatgccctgctgaaacgtatcatgttgctgaacaacgaagaaaagggagaagaatatgttgctgaaaactatgataagagcattgaagaactgacttggcacctgattaaggaacagttggttgaagcaaacgatatcaaagtagaacaggaagatgttctgaagatggctagagaaacaacaaaggcacagtttgctcaatacggtatgttgtctattcctgacgatgtgcttgacaactatgcacaggaaatgttgaagaagaaagaaactatcaataatttggtaagtcgtgtggtagaagtgaagcttgctgctgctctgaaagcacaggttactttggaaaacaagaacgtttcgatcgaagaattcaataaaatgtttgagtaatcattcggttgaataaaatataaagtcacagaaacacagagtttttataaaattataactctgtgtttttttgtgtctctgtattctttttcgtttctttgtacttacgtttatttttaatttataagaaaggaacaattaacatggatgattttagaaaatacgcaaccaagcatttaggaatgaatggcatggtattggatgatgtgattaagtcgcaggccgggtatttgaatccctatattctggaagaaagacagttgaacgtaactcaactcgacgttttctcccgtttgatgatggaccgcatcattttccttggtacacaagttgatgactatacagctaatacgctccaggcacagttgttgtatctggattctgtggatccgggtaaggatatctctatctatatcaactctccgggcggaagtgtatatgccggactgggcatttatgatacgatgcagtttatttcaagcgatgttgctaccatctgtacaggtatggcagcttcaatggcagccgtattgctggttgccggtgctgaaggcaaacgttctgcattgcctcactcacgtgtgatgattcatcaaccgatgggtggtgcgcaaggacaagcatcggacattgaaatcacagctcgtgagattcagaaattgaagaaagaactttatacgatcatcgccgatcattcgcatactgatttcgataaagtatgggcggactctgaccgcgactactggatgacagctcaggaagcgaaagagtacggtatgattgatgaggtattgattaagaaataaaaatggctgattcaaaaacaaagaaaagatgtagcttctgtggacggtcggagaatgaagtcggattcctgattacgggaatgagcggctacatttgcgacagctgtgctacccaggcttatgagattactcaggaagcattgggagaaagcaagaaaagtgcaggagctaccaagctcaacttaaaagaactgcccaaaccggtagaaatcaagaaattcctcgaccagtatgtgatcggacaggatgatgcgaaacgcttcctttccgtatcggtctataaccattataaacgtttgttgcaaaaagacagcggtgatgatgtggagattgaaaagtcgaacattattatggtgggtagtaccggaaccgggaaaacgttgctcgcacgcacgattgctaagttactgcacgtgccgtttactattgtagacgctacagtgctgacggaggccggttatgtgggcgaagatatcgaaagtattttaacccgtttgcttcaggtggcagattataatgtacctgaagctgaacagggtatcgtgtttatcgacgagatcgacaaaattgcccgtaaaggagataatccttccatcactcgcgacgtgagcggtgaaggcgtacagcagggattactgaaattgctcgaaggttctgtggtgaacgtacctccccagggaggccgtaaacatccggaccagaagatgattccggtaaataccaagaatattctctttatctgcggcggtgcgttcgacggtatcgagaagaagatcgcccaacggttgaacacccatgtcgtaggttatacggcatcgcagaaaacagcgacggtagacaagaataacatgatgcagtacatcgctccacaggatttgaagtcattcggactgattcccgaaattatcggacgtcttccggtgttgacttatttgaatccgctggaccgggatgcgcttcgtgcgatccttaccgaaccgaaaaactcaatcatcaaacagtacatcaaactgtttgaaatggatggtatcaagctgacatttgaagatgatgtcttcgaatatatcgtcgacaaggcggtagaatataagctaggtgcccgcggattgcgctctattgtggaaacaattatgatggatgtcatgtttgaaatcccttcagagaacaaaaaagagtataaggtgacgctggattatgcaaagatgcaactggaaaaagcgaatatggcacgactacaaaccgcttaaaatcaaagagtaaggctacagaaaatgatcgtaactgtattttcttgaaaatattagtcgcattttgcttggtaattacgaagttgtttataactttgtttggctctcttgaagaagagaacatacttaaagttaaaccatgaactgaataaaacaaccttagttaagatggcagggaagattaatttaacagatgaactgaaaaagtatttcggatttaataagttcaagggaaaccaggaagcgatcattaataacttgctcgatggtaaagatacctttgtactgatgcctaccggtggcgggaaatctttatgctatcagctaccttcggtcttgatggaaggtacggcaatcgtaatttctccgctcattgcgttgatgaagaatcaagtggatgcaatgcgcaatttcagtgaagaagatggcgtcgcccattttatcaattcttcattaaataaaggcgcgatagaccaagtgaggtcggacatccttgccggaaagacaaaattgctatatgtagcgccggagtcgctgacgaaagaagaaaacgtagagtttttgcgttcggtaaagatttcgttctatgcagtggatgaagctcactgtatttctgaatggggccatgactttcgaccggaataccggcggattcgccctattatcaatgaaataggtaaagctccgttgattgcgcttaccgcaacggcgacaccgaaggtgcagcatgatatccagaaaaatctgggaatggtagatgctcaagtcttcaaatcttcgttcaaccgtccgaacctttattatgaggtacgtgcgaagaccgctaatattgacagggatattatcaagtttatcaaaaacaatccggagaaatcgggcattatctattgccttagccggaaaaaagtggaggaacttgctgaaatcctgcaggcaaacggtatcaatgcgcgtccttatcatgctggaatggattcgttgaccaggaccaagaatcaggatgatttcctgatggaaaaagtggacgttattgtagcgactatcgctttcggtat

SEQ ID NO: 1136 - DNA, 27026 bp, unidentified
  source 1..27026: mol_type = unassigned DNA
ctttacgagcataacgctttcacatcccacctgatgctggacagtgatgaagtctatcaaatgacgaagcgcgggctggatgctgctcagattgccgctactaagggaatccatctcaatctggtgctggtgaagctgctggaactacatcatctggggtacgatctgcgtcactaccacgcccagcaccatgcgtttatcaaacagttcaaccttccggcacattttcagtttgatgttgccgccggatgaacttatgttcttataaccctaaaacccgtaatgaacggtgcgttatgcctgtccatcacgggtttttcctgttatttcagttttgcgaggatttcatcggcactcatgccttcggcaagcagctttttcagaacggactctgcttctgtcttttttgctccttctgcagctttggcatctgccttcgccttctttgcttccagcttgacaatttccttgtcgatagctttcagcgatgctttcttctctttcaggtcagctttcaaagtgtcaatgtttgcggtgatggatgcgatttccgctgtgagcgcttcctttgcggactgcttttctgcaatctgcgttgcgaaatcagcagtcacagttttgggcttattcttgctaccttttgttctgggcataggatacaaacctctttccaattataataactaaagtatatcactctgcgagtctacgagcaatatctatcataccatcaaattggcatttttcttaaccttattcagtaccacatccgataaagcaccttggctattcagatggattgctaaaataatatactctgccaaaaacatatctgtatacattttaaatgtatctttatttgcattaatgctgttcattcgagctgcaacatttccatggaaattgttgcaacgagaagcatagagaataccaaaaagaacgaacgaaagcctttcttcatctgtgaatttatattttttctttgtcctctgcacatcacagaaagtaatctcaacttcttttcctagcatgagcgctcttaatttcattccaaaactgtgtgttacgtctcggctctttcttttatttgcattgtcaattccgagattcactacattaccgataagtgtcggattggaaatctgacagtatgactttccataagcattatccaaaatatccgatagcgatgaaatttttcgttttaatgatttatatgaagtagccctatatttttctgctattcctttcttttccatcgcataccctttaagcatatatgatgcaacataatgaaatgttttatccggcatccttttcagaaaaggctctaatactgttttatatttgttattccagtcacctagaatcgcatcacgaacaagttcaacaccctttgtgtcctgacaaaaccctacattgttatcgcttaactgctgaacgtaatacgaatgattaattgcctgccaacaaaacaacgctgccaaatctggccgctctggtaagacataatagctatcgaatagatacgttaatatttcgtatggataaggtacgccttgattttcccagttttcatcatatataaaatcaagattttccaaaatattattattaccatgtggaagaaggtctaaatgacgttttttcgaataatcctttgcaagtttcaaaatatcgtccataatgatagcacctatttatttttctacatttattccttatcacatctctgccgatctcagatcgttgcctactgctcaccacgaagaggtgtgtgattatcagagcagcgtagggagcatccgctcccaatattccacataattcgattcttttacagattacagatgctttcttaccttcatccccgcgtagtacatcaaaccaccaagcgctccaccaactgtgttatagaacaagtcagatagttggaacgtaccgagccttaaaaacagctgtagcatctcaatgcttatcgaaaaaatgaatgctatcttcccgctttgccacaggatcttcttccgattgtttccaatcctctctctgaatgtccacgccactactgctgaaaacggcaccatcatgattacgttctcgatacactcggtggtcagctgcctctcaccgttcaccgtctcccagatgccccagccacccataacatcggacaatgggttcatccacaggttccggtttaacagggttctaaacaggatcatcgatgtcacgaaggtcagtaaaaacagtttccgaaagaacacgctctccttgaatttctgataccatgttactatggcgttcttccagccttttcctgctgcggtaggctcatatgcatacagatagaaaaacatagccaaaaaggaaagcagaagtgaaaatccaaacggctcgtagagagcggtcaggatgtttgtgaggattttggctaatacttttattgggtcttgcatcttattccactgtcacactctttgcgaggtttctcggcttatccacatccagacccttggctacagacacatagtaacccagcaactgcagcgggatcactgccaaactaccaacgaagtgctcatccacctttggaacatataccgtgaagtttacctgatcttcgatttcatacttaccataagtagtgagccccatcagataagcgccacggctcttgcactccaacatattgctgatagtcttttcgtagagttcgctttgggtcagcacgccgatgaccagcgttccctgctcaatcagactaatagttccgtgcttcagttcgccagctgcatatgcctccgagtgaatgtagctgatttctttcagtttcaaactaccttccaagcagacagcatagtcaatgccacgacctacgaagaacacatcgtgtgcattggcatacttcgcagcaaaccactggatgcgttccttatcttccagagctttctgcatcttttccgggagagtcagaagttcagaaatatagtagctgtactgttcttcagtgattttttctctaacctttgcgaactgaaccgacaagcagtacatggccgcaagctgtgcgctgtatgccttggttgtagcaacagaaatttcagggccagcaagtgtgtaaaacaccttgtctgcttcacgggcaatactactacccactacattgacgattgccattgtggtaatgcccttttcttttgccatacgcagtgctgccagtgtatctgctgtctcaccagactggctgacaacaatcaccagtgccttctgattgagtggcatcttacgatagcggaactccgatgcaagttccacacgcaccggaacatccgccatatcttccagcacatactgagcagccataccaacatgccatgcagaaccgcaggcaacaatataaatctgctcaaagttcttaatctcctcttcggtgatttccacactggataggtcgatagcgccgttcttgatcacagagttaagggtatcctgaacagctttcggctgctcatggatttctttcatcatgaaatgctcaaagccgcctttttcagctgcttctgcatcccacttgatctcggtggtctgcttctcgatttcatcaccattcagatcatagaaatgagcctcgcctggaacgagctttgcgaactcaagattaccgatgtagtacacattgcgagtgtatttcagaattgccgggacatccgaagccacataagtttcaccatccgcaataccgataatcatcgggctatccttacgcgccacccagatctcgcccggataatcacggaacatcagctcaagcgcataggaaccgcgcacacgaaccatcgtcttggcaatggcatcgatagggccgaggttgtacttcttataatagtagtccaccaacttgatgaccacttcggtatccgtctggctgtagaacgtatagccatgcttcaacagtttttctttcagttcagtatagttctcgatgatgccgttatgtacgccaacgacctcagactccactgtgccggaaccagaacgggtacagttacctgaaacatgcggatgtgcattggtttggctcggctcaccgtgagttgcccaacgcgtatgaccaataccacaggttcctttcaatgccttgccgccatctgttttctcgatcagattggacaggcgtcccttcgctttcacgacctgtgccagtgcttctccatcccggacagccaatccagccgagtcatatcctctatactccagtttagacaggccatccagcaggatcggtgccgcctgtcgatttcctgtaaatccaacgattccacacataggttttgcctctcctattattcatttttctatgatacttttccacttacacaaaacgactccggacactgccagagtcgtcattgactttataccttatatcccttttcgcagatcacattgaccacttcatcaacatacttctggcaggtatcatggtcaggtgcttccaccataacacgaacgaccggttcagtgccggactcacgaaccagaatacggccggtatcgcccagtgcctcagcaaccttagacacggcttcctgcacagcaggatcattctgtgcagccttcttatcggtcacacgaacattctccaacacctgcggatagatcttcagcggtgccgccaactcgctcatcggcttcttcttagccagcatgacttccatcatcttcagactggttaagataccatcgccggtgctggcatatttggagaagatgatatgaccgctctgctcaccaccgatacgacagccgttcttcgccatgtactcgtatacgtacttgtcgcccacagcagtcttggcgtaaccgataccttgctcatcaaacgctttgtacagaccaaagttagacatgacagtcgtaaccacagtattggtcagcagcttgccacgctctttcatatagcagccatagatatacaggatatggtcgccagtgatgacattacccttctcgtccacgcacaggcagcggtcggcgtcaccatcgaaggcaaaaccaacatccaaacccttctccacaacaaacttctgcaacccctcaatatgcgtagagccagcattggtgttgatgttcgtgccgttcggcttattgtttatgacataggtgtcagcacccagcgcatcgaaaacgcttttagcgatgttccaagaactgccgttggcgcagtctaggccgaccttgacacccttgaaagaatagatgccgagactgatcagatagcccatataacggttacggcctgccacgtagtccaccgtgcagccaatgtgctcacgacgagcaaagggcagttccggccagtccttatcaaagacatggagctttccgtcaatgtagtcctctaccagtagcaggatttcctcgggcatcttctcgccgtagcagtcaatcagcttgatgccgttatcatagtatggattgtggctggcggagatcataatgccacagtcaaagtcatctacacgagcgatgtacgccacagacggggtcgtggtgacgtggagcaaataggcatccgcaccagaagcagtcaacccagcgaccagactgtactcaaacatataagagctgcggcgggtatccttgccgatgacaatgcgagcaggatcggtatcaccattgcgttcacgcagtgcgttataataccagcccagaaagcgacccactttataggcatggtctgctgttaatgtaattccggcttcaccacggaagccgtccgttccaaaatactttcccattttaaatcttcctcctaatactattcttctaatttaaacgtatagtatctcatgcactaatatcaacgagtgcctcgtattcactaatctacaaatattcagtttttcaataatacaccacccttcctcagttattgattacccgctaaatgttgtttcccatacactgtcatcattatcttcttaatcgttccttgtacatccagataattcgtattatggcttgcatgagactcatttgcttcgtccttgaccacgaactagtcgcagtataaattgcggttgtcagtagacgcgcgtaaatagtgacccatattctcaccacgcaagcgctcatcacgtgttatcaaagtctcaaacaaatcatctccatgacgagcgccaatgatattcgttcaaatatcatcaaagaactactgaataacctttgcaagattgcctatggtaaaagcatccaccttctggacaaacaaaacgctaaggtttgcatgttggaacttaaacacaaatatactcacatcgggggccgacccccgagagttctcggcaagacttgaattgttattttttgtgttctaggctcaaattgactctactagttatttttcatttttttcaaagccgctaacgcaatttttattcccgcaatcatcccaatgcaaattaatgcataccttaacacagtataacgatacaataccaaaccgaacaacgcagctatgatcgttaatattgccataaacaagactgccttatcattatataccgatttatttccagtttctttgagatgaacctttcttgcaaatataacttgtgcacctgctaacactatatatgctaccagtgtagtatatgcagctgccatatagccaaaaatatttatacatatgaaattcagtataagatttacaatagctgcgatagtcgaagaatacattatataattagtttttttatggtatatgagtaaattagagtacatatttgatacagaagtcaaaaacactcctgctgcaataggcggcataatataaattgcttcataatattccttagtagctaatattctaactatttctggcgctaaaaaagtaagcataactgcaataatagcatacgatcccattaaagctaatgataattctctaattttattatcttttttacttatattctgatataaatacggtataaatgatgaattaattgcactccaaactaatagtgaaattgagcttacagtatataaagtactatatattccaaccgcatcattccccaccattttgcttatcatcattcgatcagaaacacttaaaatctgtgctgcaaaagcataaccaataagaggagcgctcagcttcaaagagtatttccaatactttatatttactatcgttttcccttttgcatatattttaatccatataaccgccgaaatcgccattgttgctatgttagttgcatacaatcggcccaccacaacttgatccgatcccgctttatttaaatacaaaacaactatcacggagaatattgttgatgctaaagctgatcccattgtcaatgcaccagctaatttatatttatattcatatctttgtcttaacagccaaaaatcctgcgccggtgcaaagaaaaacattactagcatcaaaattatcagcacagaaggcaaccctataattctattccaaatatcaggtatgaggaaataaatacatcctagaacaattgccatcattgatgttaatgtcaaaacagccgattgatattgatccctttccccctcaaagtctttcatcgctgcctgaaatccacccgatgttaatgatagtgttgcaattacactcaacaaagaataccaggagttatataaattaaccattccaatttcgcttgtagacattattctcgtgaaaattggaactgtaatcattgataatcctcgtgaaaaaacagatgccatggtataaaccactgctgcttttacacccaaaggaatattttgtagcctttcctttagcattttattctcctacaatgtatttccgggtaaccccacagcatcctgccgtgttgctatccaacttattgcctaagctgtagaataagaacgtaatagcctgacaccattttatctgggcttacacgcccgctaaggaatcagtcagctgtagttctaattcgcagcattcgatttacgcaggtatctggaattccaactagaaccctatttctgttcatctcaaacataaaaaaggaaaaagcatagcaaaaaacatctaatatcaagagtacttctgtagcatgatttccggattcttataagaatcctcctctccagccccttcttttaatcccttcttcctgcttttctgtttggacaaagagccgtccctagatgtttcacatttagtactagactttataacactatttacattcaaacgcagactcacttacacttattcaaaaacgcattaaattgttctatatatttatcaggtgtaaacagttcatttgctgttgtcaatgcattattttttatttcttcaatttgatctcttgacaaactaataatatccagcaatttggcttctaatgtatttaagtcattatctctaacaaggaatccattatatttatcttttacaaatagatccgtgcctcctacagatgtgcaaatactaggaacccctaacatcattgcctcgcaaaactttgtcgaaactcctgctttcgcatatcttttattcatccgtaatagaaccgacaaatctgccttttccactatacttagcgtcttgtcatgtgacaatcttccatgacagtaaattccatatttttctaattcatcgttccctaccaatttctgcacttgcatcttatcagggccaattatatcaatgacaacacgtacttcatcagtatttaatcgaattatcgcatgtaatagagtatcaatataatcctttgaagccaatgcgcctgcataaacaatttttagcacttttctattatctgaattttctcttattaattttttctttttatcagcttctgggaaaattggcggtaacaaaatagtattacagttttgctctaaataatgttgatacaaatatttgcttattgctataacattgccaacttttttatcgatatattttttttgtaagtctttttctgtattaataactctcggaataattccccgataatctttagggtttctccattccgtagtttctattaccaacttaaatccttcttttttggaaagatttaacatttttaaaacatataatatcgaattcggctcatataaaatgattatatcaggttttattttatcaagaaattttagtgtttgcttaaaataaaattttccaaatacttggtctaaattccaaaaagcgcctcttacctttcctcgtcccggataaggatccatatattggtatgccacctcatctacttcttccattcttttgccatcagaagccaactcacataacacatgaacttcatgtccacaagatttcataaatatagctctattcctgacatgaattgatggagcagtgtctggatatccgacatttccaatatataatattatcatgaattgccatcctctcttttctaattgtttctcatgataagatttacaatgcacctaatttaacttaatcttcaaataatttctcccattcctttgctattttctttatatttagctgttctctcaactcacttgcttgctttcccagtctttttgctttttccggattttttagtaatcctattatttcatccgcaaatattctatcatcaccgacaggtgtaagtatgccattaatattattttttataaccattctagcgccacctatcggacaatctgtacataccacaggaagtcctatcgccatagcttccagcattgaattagacattccctcaaaatctgatgatgatacaaaaacactagcattcactatatatgtttgaacatttgctttttgtcccataaatttaacattatcagaaatatttagttctttagcgtatttttccaattcctcctgttgttcgcctttaccatatatttctaatacatattccgggaacacatcaaggactcttttcattgccctgagaagcatgaatatatttttttgttgactcaatctatttacagctacaattcttttttctctttctccatcatatggatccggaattgacgaggtaataggatttgcaattacttttgactttttctctaggctcttaccataatactgttttgcatcttcggtttggaaaacaactctatatgctttttcgtaactatactttacataaatcttctgataccaattgtaataatactgcggagcatttctttccgataaaataaatctatatttatttagcaaattccccaatatcagatattgatatcccaagcccaacgaaatcacataatctggcgcttgatttttcaatagtttttttaattcttttattctaaaaaatattgcacatttccctgtattctcaggcaaataatcaattttaattttcggattaatcctataattattatttgcctttgaaaatacaataaagaaaacttcataaccgctttcacaaaaataatcggctaaggcaactgtaactctctcagcaccgcctccacctaagctacctattaaaaatgatatctttttcatcagcctatgatctcccgtaatatttttctcttaatgcttttccaacaagcatcattacaataacgccactatatcccaactcaatctgataatatgtagaaacgcccatatacgctagtaatacaaaaaatccgacaaattttgctgctcgaattactattctactttgctcattataaatcttactgccttttaaagtagatgcatatgcacacaaccatgcaatcactgggaagattccataatggaacataacaaacataaactgattatcgaaataagtatagttcttatttcccaagtagctataagaagcattgatacccaatccaaagatcaaatcctcccatgaatgctgcgcaaaaaagattacgtattgtccacttctggtatcttccattcctctattgaataaatttcctgtaatctctggaaaaatataagaaactcccaataccgtaataataatcagcaaaaatcccattaaaatcttaacagatctattcctatcacccagaacagcaacaaatataaataatagtattaatgtctgtaatacccatgctcttgactgtgtaataaatgcagcagcgataataagcaacaaattacagtatatcagctttcttttatccttttgggggaaatccaaaaatgtcataatgcaagcagatgtaaaccaacatgaaaatattcctttatatgacgcattcataggccattttattccataattagcccaaaaagaaaaaacagcaatataaaaacaacagcagaagagtatatttatatatggcaatttgttttccaatatattccatatattgtcatcaaaaccaagtagcgctgccactggcaacaaaatcactgatgtagaaatcgattcaaaaaaaacagattgagcaggcgctttatctaaagctaatacagtccatatcaaataatataaaatcgaacttataatcaaaatccttattcctgcatggactttttttatatattgtataaaacatctaaatatcagcacaagaataataatacttgaaaaacttaaaaagaaagttccccatcttcctttactaacaaacctgtatgtatcatatatcggctcccattcacccaacatatttcttagcaaagaccctaaaatcacgcatatcaaatatatcttaaataaaagttcattgattgtgtattttgttctcatattaaaatcaccatttggatttttcttgcaatatatttatatgattttctaattcttcgttcgtaaatctttcagaaacacgtctaccgggtactcctacatatatgccatagggatgagtacttttagttaacacagtccccgctccaataacacatccctctgctacagttactcccttaagaattgttacattagcccctatccaaacatccttctcaataatgacatcctgatcgttttcgtcatctttttcttcatctgttacatcagccatgtactttcctactacatttatcttgtgatcgcctgtgatgatactaagtcctgggccaataattactttctctttaatgataatgtttgctcgtgttgtccacaacaatgcatgagggccaatcgcaacatcatctcctatactaatgttgccaattcccttaatatcgcttttttcagcaatatgtacatttttaccacagcttccaaaagaagatttaattacactttctcggagaatcttataaaaaaccttacgcacaaattcttctgatctgtatacgaggcttccgattttattgattccaatacccccccccccccattttttatataggtttcttctgtcatagcttgtcatctctcaatctctccacttccgtataaactctttcaagtttatcaatgttttgctgtagagaatatgattctcttataatatcaacactttcctgtccagcttttaatctcttttcatcatctgtaagatactcaataattgcacaagccatgcttttactatcacctggtttatacaaatatccgttaattccttgtcttacaattttaggaattcctccaacatctgtactcacaattggaagaccacaccccatagcgtccaatattgccataggcattccctcattgtacgaagggagaagaaaaatgtctgcctctctcaaatattgtcttttttgctcatttcggatccatcccggaaattccacattatctttatatttcgcactgagtttctgcttgactttttcgatttcaccacttcccccaagaataaaccgagcatccggtattttgctgcatacttggtctacaatagctggaatatcaaagcatccttttctttcacatataaatcctagaaaaagaatcagcttattattcggttttgtaagcttctctttgatcaaatcttcttgcaaaataccataattctctacaactctaattgtctgttctggcacaatttctgcaagattcttcttccattcttctgacagtgcgatggttctaatgcatttattgtaaatcttttctatggttttcttctttttctgagatttttttcgatagaactcatcaaaatccgcaccatgaacatgattgacaaccggaattttagagagagaggcaatctcaattattaaagcctttctataaaaacttcctccaaaagagctatggacatgaacaagatttggtttccaaaacaaagctgtataaataaatttcaaatacgcgcttaatgctttagaagttttttgaattacacttccatcgcaataggtctctataaatcgcacatcgtaatcttctgtcaattgagagttccggtaaccattgactacagatgtaattccaccctttgctgtgaagctcggaactaccatgcagacctttttcttcattcctttttttcaaccttttctcttatcagataaaaaacaaacttcgaattagtttctacataccgcttaaataatctctttggttccttactccaccgatacagccattctaaactgtgatcctgcatccactgcggtgcacgtggaatcactccagaaataacattaaatgctccaccaacagctatccaaacggcctttgtatttttgctgagttttgcacagaacttttcttgacgtggcgcaccgagtgcaacccatacaaaatccgctttcgattcgttgattctatcgcacagttctgtttcttcttgtatcgtcaacggcctaaacaatgatggctcacaaccgacaatggataattgtggataattcgcctttaagtattcaagtaatgcattcagatttttttgcgttgttccataaaaatagtgacgagcatcacttttttctgtggctgcaatcacttgctccataaaatcaggcccggtcactcgccccatttccgaatacccgcgacgaactccaacgctagataagggctttccgtctggcaaagtcataaatgaattgttttgaaccgcttgatagtccaaattctcatgtgctgttacagtagtatgaacattacaagcacaaatatatcttcctcttgctttgtccatgttttctaataaatattgaatcgcagtttctttgttaacagccgaaatttcaacacctaatatattcactcgtcgcatagctttctcactttataactcagtatttcctccacaccatcttattgaccacgtttacataaccctgaatgatgcgaaccaccttcatggacacggtctcgtccacatagtccgggcagggcttgcccagaacgcccttctgcttcatcttaatggccatatcggtggcgttgagaagttcccgagtggtaataccagccaaaatgaagtcaccggcttccagcgcctcagggcgttccgtactggtacggatgcacacggcggcgatgggatgaccaatggacaggtagaagctgctctcctcgggcagagtgccagagtcggaaacgattgccaaagcgttcatttgcagcttgttgtagtcgttgaagcccagcggctcattgacccggacacgagggtcgagtttgaagccactcttttccagacggtgcttgcttctgggatggcaggagtacaggatgggcatatcgtacttctctgccagtgcgttgatggcagtaaacaggctcaggaagttcttttcagaatcgatgttctcctcacggtgggcggacagcagaatatacttatccttttccagccccagacgctccaacacatcgcttttctgaatcttctccagattcatgtgcagcacctctgccataggagaacctgtctggtaggtacgctccttgggcagacccgtatccgccagatacttccgggcgaattcggaatagcacatattcacgtcggaaatcacatccacgatacggcgattggtctcctcgggcagacactcgtccttgcagcggttgcctgcctccatgtgaaacagcgggatgtgcagtcgttttgcactgatggcagaaaggcaggagttggtatcgcccagcaccaaatagccctccggctgcaattcagagaggagttcatagctgcggcccataatgttgccgcaggtaacaccaagattctcgccaaccaccggcaccaaaatgtccgggccaaactccccgaaggtgtttttcaactcgaaatcctcccagaaaacggtggaaaggtttctgtcccagttttgattgtaatagaccacgcagcagtcaaagtattcacggcaacgcttgataacggcagccagccgaatgatctcaggacgggtgccacagccaatcatgaccttggtgcgcccgtcatttttccatttaaaattgtgttccataatattctcctaacgtcaaccagtatcttttcttacaccggctcgaaaaaggtgtccgggtggttcgggttaaagatctcattacaggtcatcaccgtcaccagattctccgttttcgacagattgatgatattgtgagtccagccgggaatcatgtggactgcctcgatcttatcgccagaaacctcaaactccaccgtttctccggtgttgatgttccgctcctgaatcagtccgtgaccggcaaccacgatgaacagctcccacttagagttgtgccagtgctgccccttggtgatacctgggcggctgatgttgatgctcacctgcccacagtcagcggtatgaaccaattccgtgaaagaaccacggttgtccacgttcatcttcagggcatacttgaacttgtccgtcggcagataggtcaggtacagggaatacaacttcttagcaaaggaaccgtctggcatcttgggcatcatgagcgtagtcggctgttccttgaactcctgcagcagatctacgatctcgcccagtgttaccttgtgtgtcacggggacgcagcagtaacggccatcttctttcagaatagtctctacaccgtcaaattcgcagtgctgttccttgccttccagcagatcaaacattccttctactaggtcgtcaatgtacagcagctccagctcggtgctgcggtcattgacagtgaaaggctcatcgttggcaaccgcccagcagaaggtactgacggcgctgttgtacttggggcggctatgccccatcaggttcacgaagcgatagacggcaaccttagccccagtttcttcagcatactggaagaacagctcctcgccagcctttttgctacgaccatactcactattaccgaagcggccagccaacgtagcttgaatggaggaggacagcataatggttgccttgttgttgtgctttttcaagcagttcagcaggtcagatgcaaagccgaagttgcccttcatgaaatcctccgggttttctggacgatttacccctgccagattgaacacgaagtctgccctgcggcagtactcgtccagttcctccgaggtagaatccagatcatactcgtagatttctttaatatccagtgccggacgggtcttgtttttcccatcacgaatgtttttcaggttgttacaaagggcggttcccaccatacccttggcacctgtgactagaatgttcattctttcacctcttaatgtactgcagtgcagtccgaaacatctgcactatccagcacagttgcattattgcaaatggtgcagttgctgccgatgcgggcaaatttccccacagttgcacctgtgcgaatcacgctgctggtgtagatcaaggcgtagtcccctatcgttgcatcacagtggacttccgttccggcattcagcaaaacaccgcttccgacagaggctccattttggatacaagcgttttgcagaaccacacagccacagccgacttcagcaaacggactgacataggcactgggagcaatgatgtttgggaacgcatagccaagtgattttgctttctcatacacctgcgcccggaactgattgttgccgatacctaccaccagcaagctgtactcttttttcagctccggcaaatcagcaagaccgccaatcaccggaataccacagatctcagcacccacagactgtccatcatccacaaaagcgcaatcgtattggaacatcgcctgctccgccaccatgcgcccgaagccaccggcaccaaccagaagcagctttttcttagacattcgggatacccttcagttcattctggacatactcggtggtcaggatcttcttaacagtgccttccacatccaaacgggtagtgttatgactggtgtaggactcgtctgccatggtatgtacctcgccgttgacgacaaacttatcgtagttcaggtcacggttatccgcagcaacacggaaataatggcccatatcctggctgcgcagacgctcctcacgggtcatcagagtctcgaacagcttctcgccgtgacgggtgccgatgatgttcgtgccggtatcgccgaacagttgctggacagccttagccaaatcgccgatagtagaggcatcagacttctggatgaacagatcgccggggttagcgtgctggaaggcgaacaagaccagatccacagcctcgtccaggttcatcagaaagcgggtcatgttggggtcggtgatagtgatggggttgcctgccttgatctggtcgatgaacagagggataacggaaccgcggctgcacataacgttgccgtaacgggtgcagcagatggtagtgccaccacgctcagcagctacacgggcattggcgtagatgacgtgctccatcatggccttggagatacccatagcgttgatggggtaagcagctttgtcggtggacaggcagacaacacgcttgacgccagcgtcaatagcggcgtgcaacacattatcagtaccgatgatgttggtctggacggcctgcatggggaaaaactcgcaggaaggaacctgcttcagagcagcagcatggaagatgtaatcaacaccgggcattgcgtcacggatagactgaggattgcggacatcgccgatatagaacttcaccttcttggcgttctccgggtgcttggcctgaagctcatggcgcatatcatcctgcttcttttcatcacgagagaagatacggatctccttcaggtcagaatccaggaagtgcttcagaacggtagaaccaaaagaaccagtaccaccagtgatcataagggttgcgttatcaaatgcagacataattattctccttttaaataaaaattttatattaatcacgctggaaaatatcgcgtgaataaaccttattcttcacatcatccagacacttgtcatagcggtttgcgatgatggcctggctctgttttttgaactcttctaaatcattaacaacacggctaccaaagaatgtgtccccatctttcagtgtaggctcataaataatgaccgtagcaccttttgccttgatgcgcttcataactccctgaatggaactctggcggaagttatcgctgttgctcttcatcgtcagacggtaaacgccaaccacaacttctttttccttgctctcatcccagctatcatttgcttcataagcaccagcaatttcaagcacccgatccgcaataaaatctttacgagtgcggttgctctcaacgattgcttcaatcaagttttccggtacatcggcataatttgcgagcagctgtttagtgtccttgggcaagcagtacccgccgtaaccgaagctgggattgttgtaatgagtaccgatacgcggatcaaggcagacgccgttgataatctgctgagtattcagccccttcatctctgcataggtatccagttcattgaagtagctaacacgcagagccagataagtattagcaaacaacttaaccgcttctgcttcggtaaaacccatgaacagagtgtcaatgttttccttgattgcaccttcctgaagcaattcagcaaaagtatgtgcagcttttaccagccgagcgttttctacatccgtaccaacgatgatacgggaagggtaaaggttatcatacagagccttgctctcacgcagaaattccgggctgaagataatattgtcgcagtgatatttttcgcggacacttgctgtgaagccaacaggaatcgtggactttatcaccataattgcttccgggttatactcaattaccagtttgataaccgcttcaactgcagaggtatcaaagaaatttttcttgctgtcatagttggtaggagctgcaatgacaacaaaatcagcatcagaatacgcttccttggcatccagagttgcagtcagatccagctccttttctgccagatacttctcaatgtattcgtcccgaatcggagatttcttgttattgatcatctccaccttctcaggaacgatatccaaagccgttacctgatggtgctgtgccagcaacactgccagcgaaagcccaacatatcccgtaccggccacggcaattttcaaatctttaaactccttcattattactttctcccttgtatacttatcttgagaacacactcttcacatactcatagctgttaatatcgccaatgtcataccgtttgcccggcataacgtaagcgtgcattggggtctgtttgctcagccatgcggcaaagctacctggtgcgtcataaccgcagccattgtccagtgcttcctgaatccgctttacatcacaggcacggtagcaatagaacggcggcacagccagatttcctttcggctctttcggcttttcctcatagctggtaatcaggtcattgccctccaacgtgataatcgccgttttctgctgctttttcagttcattttccacatggcacatcacacaggaagtatccttttcctttgcgaactccacgaacttggaaagactgaaatccagcacattgtcgccagccataaccagcaaatcatcagctaaattcagcttttccaccgccagctgaatatctttgactgctcccagacgagtttcattggtgcttgtgccatcgtcgattacagtaatctcataaggccgcgtcttttgcttattgcttttccaatcctcaaaatgctgcgcgaacttgtggttggaaattaccacaaattcgtcaatatcggtggtatccactaaatcatccaccagccaatcgaggatggacttttctcccactttcaggagcggcttcggaaaattctccgtcagcggataaagccgtgtagcgtagcccgctgctaaaatcaaacatttcatctatgtattctccttacagttccacaccatcggcactctcgcacagatggaaactgtacttaccttccaatgccgggaacgctttcagatactctgctgtgacctttgcttcaatatcttcggccttgtctgggtcaatcagcgccatgcagcagcctttgaatcccgcaccggagaagcggccaccgtagataccatcagtgtcagccataatttcatacagttttttcaattcatcgcagccacactcgtaattataaatggaagatttgccactctcgaaaaccagctgaccgtagccttccaaatcacctttacgccacagttctgcacccttttcggcacgagcaaactcgctgtaatagtgttctgcgcgtctacgccacaattctggcagacggtctttataggcttcaaacacctcatacggcacatcgcgcagccgggtatttgcaaaggtgtcatagtccatccctgcatagcccattagtgcataggccgctgccttgcactcgtcctgccgcagattgtacttagagtttttcaaagaacgctccaagccggagaagaagattgccaccttataaggcttcattttctcactggtagggatcagttcatagctgtcatctttcgtatcgaggtacagtagatggtttttcttagaaagaacttcgcagctctggtcgagcttgccgcaagcaacaccaacatactggttttctgcggccttcgccgtgagaatcatctccatcggctctagatggataccattcactttgcacagtgcagacaaaaagcaaataatgaccgaagccgacgaggacaaaccgccaatcggcaggctaccctcgataatgccagacagaccaactttcaggcggtacttttctcccagcatctttgccgcaccacgcagatgatcagcccagtctccctgcttttcttccggtactgcatttacaaagaactgggcacgcttcgggaagttcagcgactgcaactccaccacaccattctgtttcgggtggtaggccatgtggattcccttgtcgattgccaaaccattgatttttccgtactgatggtcgatatgcgcacccagcggactgatgcggtacgggcagaacgccacatcaaacggttcctgatgatataattccttgtaaacctcaacacacttcatcggtttattttcctattcttcattatttgtagaactttgcgtaccactcagcgaacttccgcaacccctcgcgcaaactggtagagggcttatatccgaagtcacgctccagcgcactggtatctgcataggtcacaggtacatcaccaggctgcatcggaaccaattttttgtgtgcttcaaaatcataatcttccggcagaacaccagcacgaatcagttcttcttgcaaaatctgtacaaagtccagcagattttccgggttttggttgccgatgttataaactgcatacggaggaacgggcagaccatcttcaccatttttacgttccggcgcaccctgcatcacacggacaacgccctcgacaatatcatccacataagtaaagtcacgcttgcagttaccgtagttgaaaatctgaatcgtttcgcctttcagcagcttgttagtaaagccgaagtacgccatatccgggcgaccagcagggccgtatactgtgaagaagcgcagacccgtggaaggaatgttgtacagtttagaataggcatgtgccatcagttcattggacttcttggtcgctgcatacagcgataccgggttatccaccttgtcatccgtactgtacggcacttttttattgctgccgtatacggaagaactcgacgcataaaccaaatgttccaccggagtatgcccttcatcgtaagaatggcggcaggcttccagaatgttatagaagccaatcaagtttgcttccacataggcatcagggttcgtaatggaatagcggacacccgcctgcgcaccgaggttcactacgatttccggcttatactgctcaaagatagattcgatcacagccttgtctgccagattaccttttacgaagctgaaattgtcaaactgctccaattcgttcaaacgtgcttccttcaggcgcacatcataatagtggttcatgttgtccagacccacaaccttgacaccctccaccgtggagagcagtctctttgcaaggttagaaccgataaaaccagctacacccgtgataaaaacactcttgtttctcagattgattttcgttttatttccgtcattcatgtacattctgcactcctcactttttctatataaacagcaacaaacccacggcggatcgcacaaaggcaatccaccgtaggcttgaactctcctgcaatctttatttgctgctcctttttgtgggtcaaaacagagcttccaaaagccacctacatataaccctcaggatttcccgcttcttgcagtttttcaacaaataaaacatttgaaggacaactcaagccgtcaaaaccatttagttatcgtaggttttcttggttgaccctattatatctctagcccctgtacccgcaacagcgattttgtaatttctcatcttttttactcctccttaccttttcaacccgtactgttgaaaaggatttttcatctattcacacatcaacctgatgtttcaacttactaatttttatttcagccaacacaaagagcggataggctcgtacacctgtccgctggctgtcaccccaccctcttggttgagatttcttcctgtgcagcatttctgccacccaaaaagatcagtcgttcattcttcgggtaagaaaatatgaacttcgggttgcggagcctttcattctctgccgtacccttgtccctattatgacagccgcgtattatttcacactccccgcccagaatcggaggctgagagatggaaaacacataatccatctttccgactttgaaagtcgcacccattgctccaaagaaataggaaactatgttcttcacacggctcttcttattggtcttactgaactccggaacccggattctcagcactttcacgccgttgatttcttcttcgtaatacttctgcgttttgtacttatcttcaatagttcccaagtaactcggcaccacacagatgaccgtgatattgaacttatccagcataccctccgccagttcacggaggatctgccccgttgacgcagtatctggaatatagtaatgagcataaatcagtagattcttcttatttgacattccgctatattcctctcacaagtttttatatctaaccgccaatgcagaacaccggcgggctttatctatttagaacagtatgttcatcatccatatcggatgatctaccacactgtagttatcatttttctcacagcggccatcttccgcaggccacttttccgaccaccactgaatcttttatgtagacctgtcatgggccactcactcatttcgcttcaactgaaactttatggtagacaccttcataccaactcaccaacaaagtgttaagtcttattgtcataactctcagtcgcacttacccatttttcaaagtgctgacccttattgtcataacccgtacatcaactcactttgttaaaactgtacaagttcatatcttcatcttgttgcaacatgaacaatcatctacccctcactacctctaattttccagaaaaatgcagttatcatgtccatctctcgtctgcaataaacttttccagaaaaatagattttggggttttcaacgctttcaacctccacctctaattcttcggaaaaatgtaggtatcatgttactaccttgctctgcaataaaacaggcttgtaataggggtatttcgcatgagttttatacgccaccgtagaccatcatgccgccactgaaagtttgaggtagacattgtttgacgctgcaacgtattttttagtgcattttgtatgctctattgagtgatttttgaaatcaaattgtttaacttggcgaaaattttcattaggtgattttttcactccgttctcatgcaatatttctggttaattagaggtatacatatctctacacgaaacctcatttttctgtatcagggtgtagtgaaaagctcacttattgccaaaaactatgtttttagaactccacccttgaccattctatttttccgaagaattagacctagacattcgtgggagcagctattacaacaaagtccgcatccgagtatgcaacctttgcatccagcgttgcgatcaagttcagttctttctctgcaagctacttctcgatatagtcatcttgaatcggggatttatgattgttaatcatatccactttcgcttgcacaatgtcaacagccatcacttgattatgctgtgctaacagaacgctaagggaaaggccgacgtatcctcgccgttcaatggtcggaacagacttctgacggattccctcgtactccgttttaccagcatcgtcatattctgcaccactcacatgatggcctgctctattgtaacaggtcacgtcacaaccattctgtgccattcgagtgcagagctctttgacaacgatctctactccgccttctctcgataatcgcttctgtccgaacatcgcaatcgcaagtttcttactcataaatctttcccacaatcccactcaattcttcatcaatatctcggctaacacaaagagcggataggctcgtacacctgtccgctagctgtcaccccaccctcatggtcgagatttctttctggatggcattgctgccacccaaaaaaatcagtcgttcattcttcgggtaagaaaatatgaacttcgggttgtggagcctttcattctctgccgtatccttgccgcgtattatttcacactccccatgtacggtaactataactcttttaccaaacatctcttcggcagccatgtaaagaaggctggcccctctgcatcgggtactcaacaacagttttacgaagtaggtgataaacttatggattctcattgttttctcttgtttttcgccatctcctcaaaacttctgaaaaagctgtgccaattttgtgccgcaggggccaaaagttcggcgttttagttcatatatagttcatataactgtaaaacacgaccggttttagtgccccatatagtgtgcaaaacaggttctttttgatgatgctacgtcagtatggtttatcggccacacatttccctcttccttatctccaacagcactccggtcaaaatcaccagcgagcaaagcagggtcagccaccagttttcggtaaagccggcgatcaggtagccaacagcacacacggcaatgaccacaaaggcgtactgcatctgggtttgcacatggttgatatggttggactgggcaccggagctggacatgatggtagtatcagaaataggcgaaatatggtcaccgcagacagcaccagccaggacagccgctacagaaacgatcatcatggtcgggtccagttcagcaaacatgttgaccacgatgggcacaaaaatagcaaaggtgccccagctggtgccggaagaaaaggcaataaaaattgcaatgcagaagatgaccagcggcacaaagttcatcaggctggaattcagattgatggccgaacgtacaaaggtaccgatacccagggcgtctgtcatacctttcagagtccaggccagcactaaaatcaggatggcgggcatcataagcttgccaccttcgggaacggaattcataaaatccttgaagccgatgacacggcgcggcagatacagaagcagcaggaatcccactgtgaccaaaccggcaaacaccaacgcttccgaagaagaacagttggcaaagtcctccaccagattctggccgccgttcaggtggccggtccagatcatagctgcgattgccgttgcaatcatgacgaccatgggcgcaatcagatcgatgaccttgcctttggcgtatttgccgccctcggtcgggtcttttgtttcctggttctggaactcttccccgccggaggtaaacagatcacctttggccgcgttctcttcatgctttttcatcaggccgaaatcgaagcctacaatggaggtgaagaacaccatatacagggttaaaattgcatagaggttgaacggaatggttttaacgaacatctcaaaaccagacatggaactgcccgccggaacgtaagagttgacggctgccgcccaggaagaaatcggcgcaatgatgcagactggcgcggcggttgcatcaatgatatacgccagcttggcgcgggaaaccttgtacttatctgtgacagggcgcatgacagagccaaccgtcaggcagttgaagtagtcatccacaaaaatcagcgcaccgagcagagaggtcgttaccaaagcggagcgcttacttttcaggtggctggaggcccactcaccgtaagcgcgggtgccgccggattcctgcatgagcataacgatcatgcccaaaaggatcatgaacatcagaatggaaaaatccacactatcgatcattgtgttaaacagcgtatcaaacgcaatccacgggtggaattctgccgccaacagtgcgccaagggcacaccccgcaaacaatgacaaatacacttctttggtcagcagtgccagcgcaatcgccacaatgggcggcat

SEQ ID NO: 1137 - DNA, 7531 bp, unidentified
  source 1..7531: mol_type = unassigned DNA
atgaaagcgattcaatggatcatttccgctctggttgccgtggtcatcatcgccgccgccgttggcggcggggtgtactttacccggctcaaaagcatccacagcatccgcaaactgaccgattacgaaaactataacctctaccgcatggatattgactatgcgtatgatctcgaccgcctgatcgaccgcggcattaccgataaccagagcatgatcaatgccatcctggccgaagctctgccctacctgcccatccatatgaaagccccaaactttggttgcagcgcgttctgcacccagggcacggacggccacaccctgatgggccgcaactatgatttcaagaacgatacctccgccatgctggtctactgcacccccaaggacggttacgcctcggtcgcctttgccgcactggataacatcaacgccaacacgccggacgcgagcatggccaaaaagctggcaaccctcaccgcgctgttcatctgcctggacggcatgaatgaaaaaggcgtttctatcgccgttctcacgctggacagtgaccccacctaccagcagaccggcaagccgatgatcgctaccacccttgccatccgcctggtgctggaccgcgccgccaccacagccgaagctgtagagctgctgagcaaatatgatatgttcgcttccagcgggcgggattaccacttctatatcaccgatgcttccggtgatggccgcgtgctggaatacgactgcaatgaccccgcccgccccctgaccgttacccccagccgcagcgtaaccaacttctttgtcatgtacaaggataacgttctgcccaaccagcgcaacggcgtttacggccatggccgggagcgctatgatgccatcgaggaaatcctggatgccaatgcaggcagtattgaccgggaaattgcctggcaggccctgcaggcggcctctcaggcccccaacccgaaggatgtgaccagcaatacccagtggagcatcctgtacgataacaccgccctgaccgccgaagccgtcatccgccgcgactggaacaccaaaaccagctacaacctggtaagcaatgttgccgtaacggatgtaggctgatcccgccgctttttttcgccaaatccggcaaaacgcattgcacttctcaaccagcagggctataataaaaccgcgtatgagaagaattccggggtgctctactgccccgttccagatggaggaaaacagcaatgctcaaagtttggatcagcggtgccaacggccatcttggtcaggcgctatgtacacggcttgaccgcgaaaaataccagctgatcgccaccgatgtggcggaagtggatgtgactgtccccgccgaagtccgcgcctttgcggatgccaaccgcccggatgtcatcatcaactgcaccggctttaatgatgaggacggctgcgagacggaccccgaccgcgcttaccgcgtcaacgccctggccccccgcaacctggcccttgccgccgatgcgctgggggccaagatggtgcagttctccaccgatgatgtgtttgccaaggcgagccaccacccctataatgagttcgatgcccccgcccctgaaagcctgtatggtaaaagcaagcttgcgggcgaagagtttgtgcgcacgctgtgccaccgctacctgatcgtgcgcagcgcctgggtgtacggtatcgggcgggattttgtttccaccgtgctgaacgccgccgcagaccctacctgcccctggctggccgttcccacggatcgctttgcctcccctacctcggccgatgacctgaccgccgcggtggagcagttgatcgaccatgataccctgggcatttaccatatcgtgtgccagggccgctgcagccgctatgacttcgcccaagccatcctgaaagctgcccatatggaagataaactggagctgcaccccatccgcgcagcggacgctggcagcacccccagctacaccgtgctggataacctaatgctccgcctggacaacctgccccagccccgcccctggaaagaggccctgaacgagtacattaactccctgcaataagcgtaacgcccggctgcctagcagccgggcacttttttgcgtgccgcaaaagagtaagaccaaattagcaattagaaattagcaattaggaattggagccgagctttttaggctgtcggtagggaacggcgtcctcaatgtcccggacgagcctgaaaattgccaaccatatgccccgcgccgtaaaatatttgtataggacgatgtgaaaaaatgattgtttatttgctcacaaccatgctgtagggcgggatgccctcatcccgccgtggagaaacctaaataatcggccacaactgaaaaaacgcttcctttttccacgatttttcccgcacctgttgaaaacatccaacccttccggtttgccctatgcgcatcctgcacaaatgcatccaatcaaatctatttaatctgcgcaaggcggagaatctgtaatttccctattacacaaaatttcaaaacgtgctatgatagccacaataaatggtagtcgcagcacggaaagacagcgagacgaaagtttcgctgtctttctttttttgtctgcggtcttgatttcagaaaggagcactttcctatgcccaaaacactgccgcaaagaatcgtatttaccatcgtcatggccaccatcatggtgtatggcatgatcgtttataacgttgccttgaacactggcggcgttaccaacgctacctttggcgtggctctgcacgaaatgcccattatggtgcccgtggcctttgtgctggaattctttgtggtcgaaaagctggccaccgccctggcgttcacctttatgcgccccacggaccgcccgcagttcattacctatgccatctccctgatgatcgtctgcatcatgtgcccagttatgagccttgtggctaccctgctgttcaaggagcccagctttggcacatgggtgcatacctggggctgcaactttcctatggcgctctgctggcagatgttctactgcggcccgctcagccggtttatcttccgcgctattttccgcaaacagctgcaagcggaaaaccaggaacagcactaaagcaaatccagcacgctgcccgcacaaacaggcagcgtgccttttttatcgtgttgcatcccctccaaaactttttgaacaaattccctgcttttgcttgacaacccccgccggagtatgatactatatctttgctgattagataacactaactggcgcgaagccagctgattgacctccgttccggctgcatcatatccccacaaatctccttactgcctccgtttcatttgcggcagtgcccaccgggcacgcaagcatgccgcgcaaaaatgccattatcgcctgcaagggcataccgaatcaaagcaaggccggcacccatggaatgagccacatgggtgccggttttgtttgtatgggtctgttcccccggccccgcgcaggaaaaataatacaataagacccccgcctgcaaaagagagaaaaaaggcgggggtcctattgatgtaagggggggcaaagcagcaacccatgtaaggaagggctgttccctacatgctgtgagggtcactgcctgcgagattagcacaaactaaccatgagcaaacaataccacaccgccaggattttgtcaagccccggagcaaatcaaaataaaaaagtttcaaaatattcaaaaagttagattaaataaacgctttctcggcaaaaataagaatactctgccgcagccgccaaacacaaaaagtaccttgcattttgtaacaacctgtgatagaatgacggtgttgaaggttagttaatgctaatcattggagcagtgctcactgctgattaaatagtttcccaaagaaaggatcgatcgataatggcatacctggaaattgaaaaagttgtaggccgcgaaattctggactcccgcggaaaccccaccgttgaagctgaggtctggctggctgacggcaccgttggccgcggcatggcaccttccggcgcatctacgggcgaatttgaagccctggagctgcgcgatggcgacaaagcccgttacagcggcaaaggtgtgcagaaggctgtggagaacatcaacaccaccatcaatgatgttctgaccggcatgaatgcttccgatatttacgctgtcgatgctgccatgatcaaggcagacggcaccaaggataaatccaacctgggtgcaaacgccatcctggctgtttctatcgcttctgcccgcgcagcagccctttctctggatattcctctctaccgcttcctgggcggtatttccggcaaccgtctgccggttcccatgatgaacatcctgaacggcggtgcccacgcaaccaacaccgtcgatacccaggagttcatgatcatgcctgtcggcgcaccttccttcaaggaagccctgcgctggtgcgctgaggtgttccatgccctggcagctctgctcaagagtcgcggcctggccacctctgtgggcgatgagggcggctttgcccccaacctgtccagcgatgaagagaccatcgagaccattctggaagccatccgcaatgcaggctatgagccgggcaaagacttcatgctggctatggacgctgcttccagcgaatggaagggcaccaagaagggcgaatatatcctgcccaaagccggcacccattacaccagcagtgaactgatcgcccactggaagagcctggttgaaaagtatcccatcatctccattgaggatgccctggatgaggaggactgggaaggctggcaggagctgacccgcgagctgggcggcaaggtccagctggttggtgatgacctgtttgttaccaacaccgagcgcctgtccaagggcattcagctgggctgcggcaacgcaatcctgatcaagctgaaccagatcggctccgtttccgaaaccctggaagccatcaagatggcccacaaggctggttacaccgccatttcttctcaccgctccggcgaaaccgaggataccaccattgccgacctggccgttgccctgaacacctgccagatcaagactggtgcgcccagccgtaccgagcgtgtggccaagtacaaccagctgctccgcattgaggaagagctgggcgattctgccgtttaccccggtatggctgctttcaacgtgaagcgctaaagaaatttatcctcccatagcttgttaaacagcagcagctcccgcagcatatccgaacaggatgtgccgcaggggctgctgctgtttgtgcagacatttgcaaaaaaacttgcaaaatctgccttatttgcatggaaaaacaaatagaactgcacttttttgcaatttttgttgacagcgcaaataatatatgatacacttttttcgattttgaaagacgaatcgtgtttgcaagagtttttcaaagcaatttacctacggaccgcccaacaggggcgggccgaaatactgacatttgaaatgccgcagcggcgagcgaaaagtgtaagctgctaagagaaaagcgcagcgtcatacggattgtatgaccgagcattttttcaacacagattgcactttgcagccgctgatgtggcgtttcaggcgaagccggaaatgttagtgttccgacccatggccatacggacagccgggtccactgccgatcggcaactttagttgccttattgattgagttaaaagctcaaattttataagttggttcctttacaaccatgaaattgcgcagtcagctgcgcagacttgtgaaacggtcaataaagagtagtaaaagtaagattgctatatagactctgacacgctaagtctttttgaatcatgccgcattcgctctcccggtaaacacgccggggggatttggcctgtggcaaaattaaaaaagctggtttcaaacgcaagtctgcacacccgtgtaaggcttgcgttttttgttttgccaaacggcacttcccaaaggaaccgcgaacggaggtaaacatgaacggtgagaaaaaacgcgcccggttggaccagcgccgcgcccccatccacgaagcgctggaaaatttccgccagatgcgcgtggttccctttgatgtgcccggtcataagcggggacgcggcaacccggaactgaccgcctttttgggccagcagtgcgttggggtggatgtgaacagcatgaagccgctggataatctctgccatccggtatccgtcatccgcgaagcggaggaactggccgccgatgcgttcggcgctgcccacgcgtttttgatggtgggcggcaccaccagctcggtgcaaagcatggtgctgaccgcctgcaagcgcggggatgagatcatcctgccccgcaacgtgcaccgcagcgtgctgaacgcactggtgctctgcggcgctgtgccggtgtatgtcaaccccgaagtggaccagcggctcggcatcagcctgggcatgaaacgggaacaggtggccaaagccattgccgagcaccccaacgcggtggcggttctggtcaacaaccccacctattacggcatctgcagcgacctgcgcgccattgtgcggatggcccacgatgccgggatgctgtgcctggctgatgaagcccacggcacccacttttacttcggcggcggcctgccggtttccgccatggcagccggggcggatatggcggcggtttccatgcacaaaagcggcggcagcctgacccagtccagcctgctgctgaccggccccaacgtccacgctggctatgtgcggcagatcatcaacctgacacagacgacctccggcagctatctgctgatgtccagcttggatatctcccgccgcaacctggccctgcgcggccgccaggtgttccaccaggtggcagatatggccgagtatgcgcgggaggaaatcaacgccgtgggcggctattacgcctttggcaaagagctctgcaacggcaactccgtgtttgattttgatacaacaaaactcagcgtccacacgctggatattggccttgcagggatcgaagtctatgatatcctgcgcgatgaatatgatatccagatcgaatttggtgatatcggcaacatcctggcctatctttccatcggtgaccgcccgcaggaggtggaacgtcttgtcagtgccctggccgaaatcaaacgtcgctaccataccgacggcgcgggcctgttgagccaggaatacattgaccccgaagttgccgccagcccgcaggaagcattctatgcccccaaaaagagcctgcccctgcgcgaaacggaaggcatggtttgcagtgagttcgtcatgtgttatccgccgggtatccccatcctggcgccgggcgagcgcatcactgctgagatcctggattatatcgaatacgccaaagccaaaggctgcagcatgaccggaccggaagatcctgacattctgcgcctgaacgttctggcctag

SEQ ID NO: 1138 - DNA, 7570 bp, unidentified
  source 1..7570: mol_type = unassigned DNA
  misc_difference 2942: note = a, c, g, or t
  misc_difference 2943: note = a, c, g, or t
  misc_difference 2944: note = a, c, g, or t
  misc_difference 2945: note = a, c, g, or t
  misc_difference 2946: note = a, c, g, or t
  misc_difference 2947: note = a, c, g, or t
  misc_difference 2948: note = a, c, g, or t
  misc_difference 2949: note = a, c, g, or t
  misc_difference 2950: note = a, c, g, or t
  misc_difference 2951: note = a, c, g, or t
  misc_difference 2952: note = a, c, g, or t
  misc_difference 2953: note = a, c, g, or t
  misc_difference 2954: note = a, c, g, or t
  misc_difference 2955: note = a, c, g, or t
  misc_difference 2956: note = a, c, g, or t
  misc_difference 2957: note = a, c, g, or t
  misc_difference 2958: note = a, c, g, or t
  misc_difference 2959: note = a, c, g, or t
  misc_difference 2960: note = a, c, g, or t
  misc_difference 2961: note = a, c, g, or t
  misc_difference 2962: note = a, c, g, or t
  misc_difference 2963: note = a, c, g, or t
  misc_difference 2964: note = a, c, g, or t
  misc_difference 2965: note = a, c, g, or t
  misc_difference 2966: note = a, c, g, or t
  misc_difference 2967: note = a, c, g, or t
  misc_difference 2968: note = a, c, g, or t
  misc_difference 2969: note = a, c, g, or t
  misc_difference 2970: note = a, c, g, or t
  misc_difference 2971: note = a, c, g, or t
  misc_difference 2972: note = a, c, g, or t
  misc_difference 2973: note = a, c, g, or t
  misc_difference 2974: note = a, c, g, or t
  misc_difference 2975: note = a, c, g, or t
  misc_difference 2976: note = a, c, g, or t
  misc_difference 2977: note = a, c, g, or t
  misc_difference 2978: note = a, c, g, or t
  misc_difference 2979: note = a, c, g, or t
  misc_difference 2980: note = a, c, g, or t
  misc_difference 2981: note = a, c, g, or t
  misc_difference 2982: note = a, c, g, or t
  misc_difference 2983: note = a, c, g, or t
  misc_difference 2984: note = a, c, g, or t
  misc_difference 2985: note = a, c, g, or t
  misc_difference 2986: note = a, c, g, or t
  misc_difference 2987: note = a, c, g, or t
  misc_difference 2988: note = a, c, g, or t
  misc_difference 2989: note = a, c, g, or t
  misc_difference 2990: note = a, c, g, or t
  misc_difference 2991: note = a, c, g, or t
  misc_difference 2992: note = a, c, g, or t
  misc_difference 2993: note = a, c, g, or t
  misc_difference 2994: note = a, c, g, or t
  misc_difference 2995: note = a, c, g, or t
  misc_difference 2996: note = a, c, g, or t
  misc_difference 2997: note = a, c, g, or t
  misc_difference 2998: note = a, c, g, or t
  misc_difference 2999: note = a, c, g, or t
  misc_difference 3000: note = a, c, g, or t
  misc_difference 3001: note = a, c, g, or t
  misc_difference 3002: note = a, c, g, or t
  misc_difference 3003: note = a, c, g, or t
  misc_difference 3004: note = a, c, g, or t
  misc_difference 3005: note = a, c, g, or t
  misc_difference 3006: note = a, c, g, or t
  misc_difference 3007: note = a, c, g, or t
  misc_difference 3008: note = a, c, g, or t
  misc_difference 3009: note = a, c, g, or t
  misc_difference 3010: note = a, c, g, or t
  misc_difference 3011: note = a, c, g, or t
  misc_difference 3012: note = a, c, g, or t
  misc_difference 3013: note = a, c, g, or t
  misc_difference 3014: note = a, c, g, or t
  misc_difference 3015: note = a, c, g, or t
  misc_difference 3016: note = a, c, g, or t
  misc_difference 3017: note = a, c, g, or t
  misc_difference 3018: note = a, c, g, or t
  misc_difference 3019: note = a, c, g, or t
  misc_difference 3020: note = a, c, g, or t
  misc_difference 3021: note = a, c, g, or t
  misc_difference 3022: note = a, c, g, or t
  misc_difference 3023: note = a, c, g, or t
  misc_difference 3024: note = a, c, g, or t
  misc_difference 3025: note = a, c, g, or t
  misc_difference 3026: note = a, c, g, or t
  misc_difference 3027: note = a, c, g, or t
  misc_difference 3028: note = a, c, g, or t
  misc_difference 3029: note = a, c, g, or t
  misc_difference 3030: note = a, c, g, or t
  misc_difference 3031: note = a, c, g, or t
  misc_difference 3032: note = a, c, g, or t
  misc_difference 3033: note = a, c, g, or t
  misc_difference 3034: note = a, c, g, or t
  misc_difference 3035: note = a, c, g, or t
  misc_difference 3036: note = a, c, g, or t
  misc_difference 3037: note = a, c, g, or t
  misc_difference 3038: note = a, c, g, or t
  misc_difference 3039: note = a, c, g, or t
  misc_difference 3040: note = a, c, g, or t
  misc_difference 3041: note = a, c, g, or t
  misc_difference 4833: note = a, c, g, or t
  misc_difference 4834: note = a, c, g, or t
  misc_difference 4835: note = a, c, g, or t
  misc_difference 4836: note = a, c, g, or t
  misc_difference 4837: note = a, c, g, or t
  misc_difference 4838: note = a, c, g, or t
  misc_difference 4839: note = a, c, g, or t
  misc_difference 4840: note = a, c, g, or t
  misc_difference 4841: note = a, c, g, or t
  misc_difference 4842: note = a, c, g, or t
  misc_difference 4843: note = a, c, g, or t
  misc_difference 4844: note = a, c, g, or t
  misc_difference 4845: note = a, c, g, or t
  misc_difference 4846: note = a, c, g, or t
  misc_difference 4847: note = a, c, g, or t
  misc_difference 4848: note = a, c, g, or t
  misc_difference 4849: note = a, c, g, or t
  misc_difference 4850: note = a, c, g, or t
  misc_difference 4851: note = a, c, g, or t
  misc_difference 4852: note = a, c, g, or t
  misc_difference 4853: note = a, c, g, or t
  misc_difference 4854: note = a, c, g, or t
  misc_difference 4855: note = a, c, g, or t
  misc_difference 4856: note = a, c, g, or t
  misc_difference 4857: note = a, c, g, or t
  misc_difference 4858: note = a, c, g, or t
  misc_difference 4859: note = a, c, g, or t
  misc_difference 4860: note = a, c, g, or t
  misc_difference 4861: note = a, c, g, or t
  misc_difference 4862: note = a, c, g, or t
  misc_difference 4863: note = a, c, g, or t
  misc_difference 4864: note = a, c, g, or t
  misc_difference 4865: note = a, c, g, or t
  misc_difference 4866: note = a, c, g, or t
  misc_difference 4867: note = a, c, g, or t
  misc_difference 4868: note = a, c, g, or t
  misc_difference 4869: note = a, c, g, or t
  misc_difference 4870: note = a, c, g, or t
  misc_difference 4871: note = a, c, g, or t
  misc_difference 4872: note = a, c, g, or t
  misc_difference 4873: note = a, c, g, or t
  misc_difference 4874: note = a, c, g, or t
  misc_difference 4875: note = a, c, g, or t
  misc_difference 4876: note = a, c, g, or t
  misc_difference 4877: note = a, c, g, or t
  misc_difference 4878: note = a, c, g, or t
  misc_difference 4879: note = a, c, g, or t
  misc_difference 4880: note = a, c, g, or t
  misc_difference 4881: note = a, c, g, or t
  misc_difference 4882: note = a, c, g, or t
  misc_difference 4883: note = a, c, g, or t
  misc_difference 4884: note = a, c, g, or t
  misc_difference 4885: note = a, c, g, or t
  misc_difference 4886: note = a, c, g, or t
  misc_difference 4887: note = a, c, g, or t
  misc_difference 4888: note = a, c, g, or t
  misc_difference 4889: note = a, c, g, or t
  misc_difference 4890: note = a, c, g, or t
  misc_difference 4891: note = a, c, g, or t
  misc_difference 4892: note = a, c, g, or t
  misc_difference 4893: note = a, c, g, or t
  misc_difference 4894: note = a, c, g, or t
  misc_difference 4895: note = a, c, g, or t
  misc_difference 4896: note = a, c, g, or t
  misc_difference 4897: note = a, c, g, or t
  misc_difference 4898: note = a, c, g, or t
  misc_difference 4899: note = a, c, g, or t
  misc_difference 4900: note = a, c, g, or t
  misc_difference 4901: note = a, c, g, or t
  misc_difference 4902: note = a, c, g, or t
  misc_difference 4903: note = a, c, g, or t
  misc_difference 4904: note = a, c, g, or t
  misc_difference 4905: note = a, c, g, or t
  misc_difference 4906: note = a, c, g, or t
  misc_difference 4907: note = a, c, g, or t
  misc_difference 4908: note = a, c, g, or t
  misc_difference 4909: note = a, c, g, or t
  misc_difference 4910: note = a, c, g, or t
  misc_difference 4911: note = a, c, g, or t
  misc_difference 4912: note = a, c, g, or t
  misc_difference 4913: note = a, c, g, or t
  misc_difference 4914: note = a, c, g, or t
  misc_difference 4915: note = a, c, g, or t
  misc_difference 4916: note = a, c, g, or t
  misc_difference 4917: note = a, c, g, or t
  misc_difference 4918: note = a, c, g, or t
  misc_difference 4919: note = a, c, g, or t
  misc_difference 4920: note = a, c, g, or t
  misc_difference 4921: note = a, c, g, or t
  misc_difference 4922: note = a, c, g, or t
  misc_difference 4923: note = a, c, g, or t
  misc_difference 4924: note = a, c, g, or t
  misc_difference 4925: note = a, c, g, or t
  misc_difference 4926: note = a, c, g, or t
  misc_difference 4927: note = a, c, g, or t
  misc_difference 4928: note = a, c, g, or t
  misc_difference 4929: note = a, c, g, or t
  misc_difference 4930: note = a, c, g, or t
  misc_difference 4931: note = a, c, g, or t
  misc_difference 4932: note = a, c, g, or t
ttattttatggcatcgagtgcgtttgagatatctgcaatcaaatccaccttgtcctcaagacctaagcttattctgataagctctgccggcactcctgcttccttaagctgctcatcattcatctgacgatgcgtgcttgttgccggatttaagcagcaggttctcgcatctgccacatgtgtctctattgcaccaagctttaatgccttcataaatgcagacgctgcctctctgccgccctttaagccaaatgatacgactccgcagcctccgtttggaagatacttctgtgctctctcatagtatttgtttgaaggaagccctgagtagtttacataggcaacctttggatgattttccaaaaattcagccactgcctgtccattttccacatgctttggcatacgcacatgaagtgactcaaggccaagattcagcataaatgcattctgtggtgactgcatagaaccaaaatcgcgcataagctgtgctgtacatttagtgatgaacgcaccttccttgccgaacttctctgcatatgttatgccatgatagctgtcatcaggtgtgcacagtcccggatatttatctgcatgtgccatccagtcgaatttgccgctgtctacgattgctccgccgagtgtggctccgtgtccgtccatgtactttgtggtagagtgtgtgacaatatctgcgccccactcaattggtctgcagtttacaggtgtagggaaggtattgtccactataagcggtactccgtgctcgtgtgccacctttgcaaaaagctctatatcaagcaccgtaagcgcaggattggcaatagtctcaccaaacataagctttgtgttcggtctgaatgctgcattcagttcctcctctgtagcatcaggagatacgaatgtagctgtaatacccatctttgccatagttaccgcgatgaggttgaaggtgcctccatagatggatgatgatgccacgatatggtctccgcactcacatatgttgaacatggcatagaaattggctgcctgtcctgatgatgtgagcatggcagcagtgccaccctccatagctgcgatttttcttgctaccgtgtcacaggtcggattctgcagtctgctgtagaaatagccctctgcctcaaggtcaaaaagctttcccatgtcctcgcttgtgtcatatttgaatgtagttgactgaataatcggaatctgtctcggctctccgtttccggctgcatagcctgcctgtacacactttgtacctatactgtattctttcattgtgcttctcctttattatgttaatgtttcagttggatatagtatattacatttggcgcgttttgacaaattcagattatataacttttgtcaccataaattcttatgctttataacatattgtatctaccagtgcttcatagctgctgtcatcagcttgcagtatctctctgacattgtgctgctctaatgctgctgtcgttttttcacctatcgagtatgctgtttccacgtatgtattctccggcagcatatgaaaaaatctttccacatttgatgcgcttgtaaaaacagcttcacttaccatgtttccaatgctttcaggaatactctcatatgcctgctcatttacatatgcatcaattttttctaattcacatatttctttaagccctgcctcaaggtcaggtgaagcctcctttgccgagaaaatgcagactttgatttcatcattatcgcccatatacgaactcaattctcctgcaagtccttttccggtctgttctgccggaataatatctgcctttatatgatgctttgcaagctctttttctgtagcttttcccactactgcaaaccttgcacttgctatcagcctgatgtctgcccctgccagctccagattatagaaaaatgatcttacaccatttttgcttgtaaaaacaatccagtctgccgatcttaccttatcggcaaattcaggaattataactggtttaattatgcctgtcttaaccggtgtgacatctgctccaagctgctgtaattttgctatcaattcgtttgttttgatatatggtactgtgatttttcttccaaacagcggtcttttttcaaagaaatcaagcctgtcattcagtgaaaccacatctcccacaacgattatagccggtgatgtcagctttgcttcctgaatcttttctccgatatccgcaagcgttcctatgcatttgcgttgcgcggcaagtgtaccgttcgatatcactgctgccggagtatccgctcttcgtcctgctttcataagccctgctgcaatgctttttacatgcgcaagtcccatcaaaaatacgcaggtgattgtctcatctgtaagaagggaatagtctatatctgcctcctcatcctttctgctgtgcgcagtgatgacctgaaagccttttgctatgcctctgtgtgtgataggtattcctgcagccgcaagcgctgcaaccgatgaactgacacccggtaccacttctacctccacatttctatctaccaggtagagagcttcctctccgcctcttccaaagacatacggatctccgccctttaaccggactacaagctcatgatattttgatttctcgtacaaaagctcgtttatggcgtcctgcttcatgacatgcttgtgattttccttgcccacataaataagctcacagcctgcctttgccattgaaagaaactctggtgatgacagcctgtcatacaccagacaatccgcctgttttatatatttttctccttttaaagtgagcaggcccgtatctcccggtcctgctccaactaatactacttttcctgtgttttctctcatgattttcctaattactttccaatttataccgaatatcgtgcacggcacgctccacaatatcgtttctgtctgatgnnnnnnnnnnnnnnnnnnnnnnnnnnnnnnnnnnnnnnnnnnnnnnnnnnnnnnnnnnnnnnnnnnnnnnnnnnnnnnnnnnnnnnnnnnnnnnnnnnnnaatttataccgaatatcgtgcacggcacgctccacaatatcgtttctgtctgatgtcatatcccatacctgctctgtccttgcaagctgttttccatcctctgagccaaacatcgcaagaagctttagcctgttatttttgttgctgtcattaccgcggtctttttcacttacaatatcacagtatgcagccacaggcagatggcagtttccaccgattcgctttaaaaattctctctcaatgcctgcgcacagattggttttctcatctgacaaagtatcaagctttgccatcagcttagcattgtcagcacgtagctcaagcgccagtgtgccctgtgccggagccggaatcatatcatcctctgaaaagtactgtgtgatctcagaatctcttccgatacgctttattcccgccgctgcaagtacgattccatccagcctgtattcgttatacttattctgtttttcgttagctatctcattgttatttacagtattatcggcaatctcttcatatataatttcaccatcatatagcttacgaagcctcgtatcgatatttccgcgtatgccaaccaccttaaggtcaggacgcagctttaaaagctgatactttctgcgcttgcttccggttcctatcacggcaccatgaggaagctcatccagtgaagcggcattttttagcaccaaaacatcccttggatcttcacgcttccatgcctttgcaaatgtaagccctgctgccggttcatcaggcatatccttcatggaatggactgccatatgaatctttcccgataaaagctcgtcctctatctcctttacgaagataccctttgagccaatcttatcgagtgcctttttctgctctaaatcgcctgttgtctttatgataacagccttaaaatcatcatccggatatgctctttttaacttatctatcacgtaatcagtctgaacacgagcaagctttgagcctctcgttcctattaaatacctcattttactctcctacggatcatgccattttccatttataatttataaatgaacaacaacttaaaatctgtaataccatactttaaactatatttccggaattcttccattatcaatagctgcacacaagatttctttaaacacacgctttctctcggcttcagtgtcatattgcgctattacttttttgcggatctgtcccatgtattcgttcagctcaccaagaaacggagtaagaatctcctgctctttgcctttcagatactgagtcagcacagggctgtttcctccgctcgaaaatgccgcaacaagattcttttcctttatgtatgacggaaaaataaagctgcaatcagccttctgatcgaccgcatttaccatgatgtccttagctttgcaatactctgcaatctcatgatttaaagcattgtcatcagtggcagcgatgaccatttccatgccgtcacagtcttttcgttcaaaccttctctttatgaatgtaattctatctgctgcatccgggtccgtctgattgttttctttatttgccgtatatgagcccgttttatcctcgcttgctatatcatcaattgtaagctttctcagctcatcacatatattctctgccacaaccgtgaccttcgcgccaaaatccagcattacgatcaccttgcggtatgccacatttccaccgccgacgatcagacactctctttccgtcatatccacaaacatcggaaaatacgccatttttatctccctgtaataccatatccatactttatttcatnnnnnnnnnnnnnnnnnnnnnnnnnnnnnnnnnnnnnnnnnnnnnnnnnnnnnnnnnnnnnnnnnnnnnnnnnnnnnnnnnnnnnnnnnnnnnnnnnnnngctttatgctttattttttgccttatgcttcacactgtatccattgagcattccttcaaaaacaggacgaagcttggctgaaaacactgctgccgatacgcataatataaagtccggtgcaacagttatcagacagtaatccactattactatgccccagctgacaggtgttgccgcatagaaattcttcatgcagtaaaaatatattgctccaactgtataatatgccaccagtccgaccgttgccggaagaataagtgtaaacgcattggtctttttaagcttttctgtgatagctccgattaaaaatgcggcaagcacaaagcctaagaggaatccaaatcccggtcttaaaatgtatgtaggaccgccgcctgctgcaaatacaggcactcccaccagtcctatgcacagatacactatcacgctaatcggtgcaagctttgccccgagcaaaaatcccgccatcagcacaaaaaaccactgtaatgtaaaatgcatggtgtacataggaagcggaatatcaatcttgataaatgctccaactgctataagcgccgcaaaaagtgcacatgttgtaagttccttcgtttttaatttcattttcgcacgctctttcgttttattaaatatacatgctataataacatctttctctaaaaaagaaaagccatcttcgatgaagctgacttttctttgcagctttcgctgcgactcaaaacattaacatatgatttagaagtaatattcatcagaatatattcgtaaatcctctttcgtgacctgtccaccctcgatatgaaacgagttgattacaggattttctgccataagcgacattatcatgtagctcgcattcggatcgtatgcaagctttatatcctcatccgatggccttgaagggctagacggatgtgaatgccagttgccaagcggcttaaggccgtttgctctcatgtcctttatggctgccagctgctcctttggatccattgtgaaatggtcctcggcatggtctgtattcgtcaggtaatatacctttgtgatgagacgaccgttttcgtcctcactgcctgctatcagaccgcacgcctcctccggcagatgctctttagcatattttgctatttcatccagaaacggatatttcattcttatgatactcatatcgttcctttccttactgtctttttattcctgtgtacgaggtgcatcaaatctgcccgctgtctcctcgcagacctcctgctcgtagtcgattggctcgagaatagtcggatggtcgccacagactgcacagttgtgtgtatcctttggaagcttaatcttgtggaactccatggtgagtgcatcatatgtaagcagatatcctgtgagcagctctccaacaccgattaaatacttgatagcctccatagcctgaagcgaaccgattactccgcccatagctccgataacacctgcctgcttacatgtaggcactgcatcctttggtggcggattcttgaatacacatctgtagcaaggtccctctcccggcacatatgtcatgagctgacccttgaaacggatgattcctgcatgtgaaaacggctttttctcaagcacacatgcatcgttgattaagaactttgccgggaaattgtcagttccatcgatgatgaaatcataatccctgataagctctctgatgtttgacgcatctacaaacatacggtatgtattgacctgaacgtccgggttcatggcgttcattgtctcttttgctgactttaccttggctttgcccacatcggctgttccgtggataatctgtctctgcaggttggataaatctacctcatccgcatccacaatgccgattgtaccgacgcctgctgccgcaagatacatggctgccggagctccaagtccgccggcaccgataataagcaccttgccctttaataatttcttctgacctttaacgcccacctcattaaggataatgtggcgtgaatagcgctcgatctgctcatcagtcattgccattagcatccacctcccatgaagtaaaggaactctacattgtcgccatccttaagcactgtctttggcttatcctctgtggcaacaaattcctcatttattgaaactgttacatactcaggcatatctacattctcaagctcgataagctccggtaatgtaagtccatccttatattctttcttctctcctgctactgtgatagtcattttatttcctcctgtgtcacagattgtggtatctgtaagtgttattatcctgtatcagactgctttatataataatctaaaaactataataatgctttaacccacgccttcaaatcggcaggcttttgtacgccgacctttctgtctaagacctctgcgtcttttacgaaaagcagtgtcggattcgcagtcacctcatactcatcagcgagctctccgtcaaagtttgtgttgaccttgtatacgtgaagcttatcctcataatcatcctcgatatctccgagaaccggtgccagcttcttgcaggccacacatgaatccgagtaaaaatcaacaattaccggaagcttgctttttaatactttttcatcgaaatcagcctttgaaattcttgctgccat

SEQ ID NO: 1139 - DNA, 10525 bp, unidentified
  source 1..10525: mol_type = unassigned DNA
agagggcgaggacgcttaccgataggataaaactatgaaacttttaaatgaaattctaggcacaaaataccccatcattcagggcggcatggccaacattgccactggcgagtttgccgccgcctgctccaacgcgggtgcgctgggcatcattggtgcgggcggcatgaacgccgacaccctgcgccagaacatccgccgctgcaaagagctgaccgacaagccttttggcgtgaacatcatgctcatgcatccgcaggcagatgagtttgccaagatcgtggtggaagagggcgtgcccgttgtaaccaccggtgcaggcaacccgggcaaatatatccccgcgtggaaagcggcaggcatcaaggtgatcccggttgtcgccgccgccgtgctggcaaagcatctggagccgctgggcatcgatgctgtcattgctgagggcaccgagagcggcggccatgtgggcgaaatggctaccatggcgctggtgccgcaggtggtggatgccgtaaatgtacccgtcattgcagctggcggcatcgccgatggccgtcagctggcagcagctctggctctgggcgcctgcggcgtgcaggtaggcacctgcctgctggtgagcgaggagtgccccatccatgaaaactacaaagccgccctgctcaaggccaaggacagcgataccatcgtgaccggccgcagcgtgggtgcgccggtgcgggtgctgaaaaaccgcatgagccgcgaatatgtccggcaggaaaacgccggtgccgacaagatggagctggaaaagtacacccttggcagcctgcgccgcgccgtgtttgagggcgacaccaccaccggaagcctgatggccggtcaggtggcaggcatgctgcacgaggtgcgcccggtggcagatattcttgcagacctgtggaacagcgggaggcagcgcattgccgcgctgagcaccgaatgctgaccctcggcagaaagaccctgtctgtgcccatcctacagggcggcatgggtgtgggcgtttccctcggcgggctggccggtgccgttgcagcctgcggcggcatggggtgcatctccaccgccgatgcaggctaccgggagccggactttgcccgtgacccggcaagcgccaaccaccgtgccctgacagcggaaattaaaaaagcaaagcagatcgcaaagggcgcgggcatggtagccatcaacgccatggtggcaacgcaggattatgcggccgcgatccgcaccgctgtggaagcgggcgtggacgcggtggtgtccggcgcgggcctgccgttggagctgcccggcatcgtgggcacaacggatgttgccatcgcgcccatcgtttccagcggaagagccgcaaagctcatcctgcgccgctgggccaaggagtttggccgcaccgctgattttgtggtgatcgaaggctgcaaggcaggcggacacctcggctttgccgaagatgacctgctggcaggcaaatgccagaccctcgacgacatcctgcccgaggtgctggccgaggtaaagccctttgaagcacagtttggccacagcatccccgtgtttgtggcaggcggcgtgtataccggtgccgatatggcccactttaccgcaatgggcgctgcgggcgtacagcttgctacccgctttatcaccacctacgagtgcgacgcatcccagggctacaaggacgttctgctgaacgcccggcccgaggatgtacggatcatccacagcccggttggaatgccgggccgtgcactgaacaccccgctggtgcaggcgctggcagaggggacccgcttccctccccggcactgtgcccgctgcctgaagacctgcgaccccgccaaggtgccctactgcatcacccacgcgctcatcgaagccgtaaagggcaatgtggaggagggcctgttcttctgcggggccaacgtgggcaggctggaccggatgcgcacagtacaggagctgatggatgaacttgtgaccgaatggaggcaaaatcaatgaagcttgccgttttatatgccggtcagggggcacagcaccccggcatgggcaaagaattttacgaagactctcccgcgttccgggcggcatttgacagtgcagaactggacttcgatctgcaccgcgtctgctttgaggacccggacggccttttgaatcagaccgaatacacccagccctgcatggtggcctttgcctgcggcgtgaccgcagtgctggcccagcagggcgtgaaacccgcttatgtggccgggctttcgctgggcgaatactccgcgctggaagctgccggggtgttcaccgcaaagcaggctatcgagctggccgcttaccgcggcaaagccatggccgaagctgcaaagggcatcgactgcggcatgaccgccgtgctgaaccttgaccggcaggcacttgcagcctgctgtgagcaggctgcacagctcggctgtgtgcagatctgcaactacaactgcccgggtcagctggtcatcggcggcgagaaagccgctgtggacaaagccgccgcactggccaaagaagccggtgcccgccgctgcatcccgctcaaggtgagcggcccgttccacacccgtctcatggcccccgccggggatgcactggcaaagcgttttgcgtctgagccctttggcgagatgcaggtgccggtgctgttcaactgccttggccgtgaaaaagctgagcaggacagcatccccgccctgctcgtgaagcaggtgcagagcagcgtttacatggaagatacgctccaccgcctcggtgagctgggcgtagaccatattctggaagttggcccgggcagtgctctggctggctttgtgaaaaagaccctgcccggcgtggtctgcgcttcggtggagaccccggagcagctgagcgccgcactgacagcatggaaggaagagctatgagcgaagaaacgatcatccgcaccgccgttgttactggcggaagccggggcattggccgggctgtgtgcatccagctggcaaagcagggctgcaatgtcgtggtgaattactgccacggcgaagctgcagctgccgagacggtggctctgtgcaaggccgaaaacgcaaatgccgtggctgtgcaggccgatgtttccactgccgagggctgcaaagcgctctttgaacaggcggtgaacgcctttggccgggtggatatccttgtgaacaacgcgggcattacccgcgataatctgatcctgcgcatgagcgaagaggacttcgatgcagtgctgaacgcaaacctcaagggtgcgttcctctgctgcaaggaggccgcccgccgcatggtgcgccagcgctggggccgcatcgtgaacctttccagtgtggtggccctgcggggcaacgccggccagaccaattacgccgccagcaaggcgggcctgatcggcctgaccaaaagccttgcccgcgagctggcaagccgcaatgtgaccgtgaatgcggtcgcgccgggctttatcgagaccgacatgaccgccgccctgccggaagccgtccgtgccgaaatggcaaagggcatccccgcaggccgcgcaggaaagccggaggatgtggcaaatgcagtggcattttttgccgcagaacaaagcagctatctcaccgggcaggtgctctgtgcagacggcggcatggcaatgtaaaaggagaaaactctcatggaaaaacgcagagtcgtgatcaccggccttggcaccgtgaacccgctgggcaacaacaccgccgacagctgggccgctgccaaagcgggcaaatgcggcatcggccccattacccagttcgataccaccgattttaaatgtaagctggcaggcgaggtgaagggctttgacccggaaaccatcgtggacaaaaaggaagcccgcaagatggcccgctttaccgttctggcccttgctgccgccgctgaagcagttgcagacagcggtctggacaccgaagcggaagccaagcagatcggtgtcatcctttccagcggcatcggcggtctgcccaccattgaggagcagcacacccgtggtgaagagaagggcatggaaaaggtaagcccctatttcgtgcccatgtccattgccaacatggcagcggcacaggtggccatccgctttggcctgaagggcatgtgcacctgcccggtgacggcctgcgccggcggcaccaatgccgtaggcgatgccttccatcgcatccgtgacggctacgagaccgccatggtctgcggcggtgcagagagctgcatcagccctctgggcatcggcggctttaccagcatgaaagcgctttccaccgcgaccgatccggatgcagccagcctgccctttgacgcgcggcgcggcggcttcgtgatgggcgaaggcagcggtgtgctggtgctggaagagctggagcatgcccgtgcccgcggtgcgcacatctacgccgaggtggtgggctacggtgccaactgcgatgcctaccacttcaccgcccccgctcccggcggcgcaggtgccatcgactgcatggcgctgacgctggcggatgcaggcatcgcaccggagcaggtggaccacatcaacgcccacggcaccggcacccacatgaacgatgcctgcgagaccgccgccatccatgcggtgttcggcgaacacgcaaagcagctgaccgtggtgagcaccaagagcatgaccggtcatctgctgggcggtgcaggcggtattgaagccgtatttacagcgctggccctgcatgaccagtttgcgccgcccaccatccactatgagcagcccgatcccgaatgtgatctggactatgtgccgaacactggccgtgcgcaggccatgacctacgcactgagcaacagtctgggctttggcgggcacaacgcctgcatcgccctgcgcagatgggagggctgacccatggcagaaccccgcaccgtgcgtgcagacgcaaacgccctgaacagtgaggagatcgcggcgcttctgccgcaccgctatccctttgcccttttggaccgcattctggactatgagccgggccagtgggccatcggccgcaagtgcgtgagccgcaatgaggaatttttctgcggacattttcccggccagccggtgatgccgggagtgctcattctggaagcactggcccagaccggtgccgttgcggcgctcagcctgccggagaacaagggcaaactggccctcttcggcggcatcaagaatgcccgcttccgcaaacaggtcacccccggcgatgtgctcaccctgcactgtgaactggtagagcagcacggcccggtgggcgtgggcaaagcctcggcgtgggtggacggcaagtgcgccgccaccgccgagctgacctttgtgctgaccgaccccaacgcctaaaaacacccctgtgagtttaaaaaagctcacaggggtgttttccgttattttaccattgagaagccgcttcgctctctcagccaagcgccacatccagaaccatcagtggtgccccaccagataggccacccggtcgatctgcgccgccgtcatgccggtatccgccagaaattcccgcaccagcggagcactctcctgctcctgatactttccattggtgttactgcaatggtaggatcgcatatttactgatttctgtatctgttcaggacagcatccgggatatggcagtaactgcagtcttcagggtgccgttccagatggtgctgatgctcctcagcgctccggacataatttgtcagcggcagcacttccagcatgatcttgtcccggtcctcctggccgtttataaaagctcttgcttcttccagatgtctgggatctgtactgtacagccctgtccggtacttttttccaacgtccacgccctgtttgttcaggctgtaggggtcgatgatctcaaacaggtgtgccatcagttctgaaatgtttgtgtttttctcatcatagaccacttttacgcattctgcatatccatcgtatgggccatccagagaactcgttgttccgttggctctgccggcttcagtcatctgtacaccaggcactgtgtcaaaaaaatgctgtacgccccaaaggcatccgcctgcgatatagaccgtttccatcttgattttcccctttcctgttgatcatatatcagctttgctcctattctaccacgcttttccactgtcggaaagatgtcggaaaacaaaaatggccccggagggcttatcgcagctctccggggccgccttgtgcagagtgattttctctcgatgggctttcagaaatgctttgctgtaatcagcttgcgtgaaccacagcggaagaaccctcataagatacagaaaagatttctgtatttttcttgacagttttcccatattctgttttaatacatctgataaaagggagtaaagggcagtattccggcttattcttcgggagactgctgcatggcagcgtcatcacggcagaaatgcccgatgtcatgtgttcgcttgagacttttgtcacagacaaggtgctgtggcaggagtctctttttcttgtcaccgtaccggagcacaataggaggcaagaaaactatgaactttctgaacacattcgcaagtctgttttccaattttggaaacctgacttggcagatggtggtgatgtggggcattggtgcattgctcatctaccttgccatcgccaaaaaaatggagccgagcctgcttttacccatgggctttggtgccattctggtcaatcttccgctgtccggtgccatcacgcagggcgataccgtaggccccatttctgccctgtttgaagcaggcatgtccaacgagctgtttcccctgctgcttttcatcggcattggtgctatgatcgactttggtcccctgctggaaaaaccgtggctcatgctctttggtgccgcagcgcagtttggtattttcttcaccctgtttctggcaggcttcttctttgatttgaaggatgctgcttccatcgctgtcattggtgcagcggacggtcccaccgccatttttgtagctaacaccctcaactcccagtaccttggtgccatcatggtggcagcgtacagttacatggctctggtgcccatcgtgcagccgccggtcattaaactgctgaccactcagaaggaccgccgcatccggatgccctatgaaaagggcaatgtcagccagctgacgaagattctgttccccattgttgtaaccatcattgccggtatggtagctcctgccagcgtagctctcgttggttttctgatgttcggcaacctgctgcgggagtgcggcgtactgaacgccctcagcgaaaccgcgcagaatgtgctggcaaacctcatcaccatcgtgctgggcctgaccgtggccggacagatgaccgctgacaagtttgtccggcccgataccctgctcatccttgcactgggtctggtagccttcgtttttgataccgcaggcggcgtgctgtttgcaaagctgctgaacctgttcctgcccgaaggcaaaaaactgaacccgatgatcggtgcagccggcatctccgccttccccatgagcggccgtgtggtcaacaagatgggattggaagaagataaccagaatttcctgctgatgtactccatcagcgtcaacgtttcggggcagattgcatccgtcattgcaggcggcctgattctgaccctgatggcttaacggaggtacacttatgcttcatctttcttcgtggatgaccaccctgcccatgatgctcatcggcatggtcggcattcttctcgtcattggtgttattgtcctggctgtgatgctgctcaaccggctgacaagtcggaaataattcatcccatcaagtagaaacgaatttacggcgaaatatcgctataaatatgatgcacaggccttctaaaactgtgattttgtgacaacttggtgtcacttcaataaagaacccgctttcacttcaatttgatgttgaaaacgggttcttttcgcttttatgcgtgtttgacggcggtttcaaaaagattgactgctgcgtcctcttgtgtgtcggtgttgtgggtaccacgctttttcacttccgaaaagatgtcagaatacaaaaacccccgaagagctttttacggttctccgggggttggttctatgcgccggtgttcctcacaccgatgcacaaacgttattcgatttcaatgagattgggattcgcaggcagagccttctgctgctgcggtgcgggcagtacgatgtgcaggatgccatcctcgaactttgcgtggatgtcctccttcttcacggcatcacccacatagaagctgcgggcacaggtaccggagaaggtctcacggcgcagataacggccattgttgtccttctcgtcattggagtggttgcggacggcctgaatggtcaggtagccgtcgctcagctccatctgaacgtcttccttcttgcagccgggcaggtcaacagccacatcatagttgccatcggcggtctgcttcacatcggttttcatcatgtttgcgccgcgcttgccgaaggtctcacgctcttcacgattcattgcacgctccagcgcaccgtcgttccagaacggatcaaagaaatcatcgaacagattttcatggaaaacagcaggcataaacataaaacaaccctccaatcccggcgttcgggtcgggcataaaatcaagatcgtgcatcaggagcggagtcttcccgggagccttgcggttccctcatgcccctttctcctgagcacgccactgttataacaccgtttattagcagtgtcaatagcagagtgctaaaattcataaaagaataatacttttataatatttcatgcaattctcggcaaaatcgtttgcactggattcaattttttcttctctgatcgtagtctttcgctgtgacagaacggatgcaagccgtttcttcagaaccaggcgatccattgcccgcgtaaacaatgcagttatcaaaaagtctctctgtccttgcagcgtcttgcgttctgccggtccacccgctataataatgtagaaaccgagatgaaaagagcgtgatattgtggaagagaccgagatcagtcattttctccacattctggtccgaatgggcgaagctttacaaaacagtggcgcagaagtattccgcgttgaggacactttgaaccggatcgcaatcgcctatggggcagaagatgtgaatgtattcgtgatcacatccagcatcgtggtcacgcttaccatgccctcgctgccgccgcagaccgagacccgccgcctgcgtcacgctgccagcaatgacctgctgacattggaaaagctcaatgcgctcagccgccgtatctgcacagcgcctccttccatagaagagtttcagcgccagctgaatgccattctggcacagcatccggacccaagactgcatcttgccggcagtgtgttggctgcttccagttttgccatcttctttggtggaaatctctgggacggcctgctggccggcggcattgccgttctgatttgctggatggagcgctatctctcgcctttttgtatgaatggcgtagaatttcagtttatagcatcatttctcagcggtgtctccactctgctgctctgccgctttgggatgcagtttcatgccgataaagttctgattggtatcatcatgctgctgattcccggcatcatgctgacaaattccatccgggacatcttacttggggacattatttccggctctcttcgactggtggaagccattctgatggccgccacccttgcactcggcatgatggccgccatctggttgatgggaggaatttccgcatgatacaggttttttcgcagttgctcagtgctgcccttggttcggtcggtttcggactgatcttcaatctgaaccggcactacttacccgccgccggtgtaggcggacttctggcatggctggcttatcttcttgccgccaacaccctgcacagcgtctttcttgccaatctgttggccggtttctgtgccgctctgtatgccgaaattcttgcccgatgctgcaatgcaccctctacgcctttcttcatcactgctgccattcccctcattcccggaagcaccctctactactgcatgaacgcagtcgtctccaatgatttgtctgctgcagagcatttcggagagcagacttttctggccgctcttggaattgccggcggtatggcaatcgcatggtgcctggccgatttgagccggaagctgcacgcacttgcaatccgttcttcgggaaagtagcgatcttccacattgaagaatgcccctgatgatcgggtcgtttgagctgctgctctgaaatacggaaaaaggccgtccggcaccgcagcagggctgcctttacaattacaaggatgtgtctctatgaaactcaaacaattcattcagcaggaaacggtcct

SEQ ID NO: 1140 - DNA, 21501 bp, unidentified
  source 1..21501: mol_type = unassigned DNA
gccgatgccggtcgtcgaagcgaacaacgagataaaagtcctgcgttctaaagagcaggacgagattgaacgcatacttacagcgctctccgcgatggtcggcgagtttgagcaggggataaaaaacagctatgagtgcgccgttgagctcaatgttatcttcgcaaaggcgcagtatgcctattcaataggcgcgacggtgccgctactcaactccgacggcgagatagagctgcgcgccgcccgccatccgctcattgacaaaaacaaagtagtccccgttgatataaggctcggcacggactttgacacgctcgttataaccggcccgaacacgggcggcaagaccgtctcgataaagactgtcggtctttttacgctcatggcgatgtgcggactcatgatacccgcgggcgacaggagcaggctctccgtattcgacgaagtcctcgcggacatcggcgacgagcagtcgatagagcagtcgctctcgaccttctcggcgcatatgacaaatattatagatatcatgggtcaggcgggcgaccgcagtcttgtgctcatagacgagctcggagcgggcacagaccccgtcgagggcgcggctcttgcaatggcggtgctcgaagacctgcatttcaagggcgcgaaaatagccgcgacaacgcactatgccgagctcaaggcttatgccctcgagactccgcgcgtcgaaaacggctgctgcgagttcaacgttgcgactctcagcccgacctaccgactgcttatcggcgttcccggacgctcgaacgcgcttgcaatatgcgagcgcttgggcatggacatgcgcgttgtggacagggcgaaagagctcgtcaacaatgagaatgtccgctttgaggatgtcgtcgacaagctcgaagagaaccgccgccgcatggaggaggagcacgagcgcgccaaggagctgaccgcaaaggcgcgcgccgagctggagcgagcggaaaagcggctcgccgaagtcgattctctgcgcgaggcggagatagagaaagccaaggcgcaggcagcgaagctgacccagcaggcgaagcgcgagagctacgctctgctcgacgagctcgacaggctcaaaaaagaaaaagagaagacaaaagatgccgcagaccttgcgcgccgcgcacgcgccgcagtcagaaagggtctcggcgcgatagacgaggcggtcgaccccgtggtcgccatgggcgttgagaacgacggctatgtcctcccacgcgagctcaaaaagggcgatactgttctgatagccgatctcggcaaggaggcgacagtgctttcgcccgttgacagaaacggaaatgtcgaagttctcgcgggcgcggcaaagacgcgtgtaaagctcaaaaacctgcgccttatcgagaacgcgccgaaaaagcgcagcccgaactccggcgcccgccgcacgggagttgagagcaagatgaacatggatgcctccgcgcggctcgatgtccgcgggctgaccgttgacgactgcatcatggagctcgacagatatattgactatatgctccgtatgggtctcggcgagttcaccattgtccacggcaagggaaccggtgcgctcaggagcgctgtcaaccagtatcttcgcaagtcgccgtatgtcaagagcttcagactcggcgtttacggcgagggcgaggacggcgtgacaatagtcgtgctcaagtgacgcgaaaaaagttttccacacggttttccacatgcctgcgggcgcataacggcacattttgttgtcttttgccgctcgaaacacaagcggttgatgataaaaaaacaatcttgtttttccgccgcttttccacatccggaatgttgaaaaaagttcggttttggcgaaaaaatgtgcttgacagccgacgatatttttagtataataaccccctgtaaagcgtttcgactttacagaggggtttaacctttacgcgatcatgatgaaaagggggagaaaataaagtggcaaagaatctggaaatagctgttttgcttgacctttacggcgatatgctgactgaaaaacagcgcgactttctgggctattactacaacgacgacctgtcgctctccgagatcgcggaaaacgaggggataacccgccagggcgtgcgcgatgcgataaagcgcgccgaagcccagcttttcgatatggagtcgaagctcaagctcgcctcgaaatttgacgagatacgcagcggactcactgaaatcatcgactgcgccggcgagataggggactacaatctcaaccacagcctgtcgcgcgaagtgaatgattataccgtgaagattaaagccatcgccatgtcgttgatggagtgatcggactgcggaaaaatccgccggagccgcgttgtgagaacctgtgaattcagtcacgcacacaaagtgcgctccttcattcacagaaccccacgccttgctccgacaaatttttctcagtcctcgattgtgcgatgtgatgcgaaaaaagtttgccatagctgcgttgtgagaacctgtgaattcagtcacgcacacaaagtgcgctccttcattcacagaaccccacgccttgctccgacaaatttttctcagtcctcgacagagtgctgtgatgcggaaaaattgcccagtactgcgttgcaggaacccgttcgctcggttgctgctgtaggggcggatatcatccgcccgcgaaatcagcacagtcctcgattgtgcgatgtgatgcggaaaaatcgctcgctcaattcggcttgaaacggtaacataaaaactacttactttttatacagaggtgaaaacattggcatttgaaggtctttcggaacgccttgaagcggcgttcaagcgtcttaaaagcaagggcagcctcaacgaggcggatgttcgcgcggcgatgcgcgatgtgcgtatggctctgcttgaggcggacgtcagctacaaggtagccaaggatttcaccgccaaggtcaccgagagagctatcggcgctgatgttatggagagccttactcccgcgcagatggtcataaagatagtcaacgaagagcttatcgatctcatgggcggtacgaagacccgcctcgcgactgcggcgcatccgccgacagtgataatgctctgcggtcttcagggcgcaggtaaaacgacgcactgcgcaaagcttgcgctcatgctcaagaaccgcggcagcaggccgatgctcgtcgcgtgcgatatctatcgtcccgcggctatcaaacagcttcaggtgctcggcgaaaaggtcggcgtaccggtctttgaaaagggtacgcaggatccggttgaaacagccaaacaggcggtcgcgcttgcaagggacgagggcaacgactatgtcctcatcgataccgcaggccgcttgcatatagatgagcagctcatggatgagctcaagcgcatcaagtcggaagtccgcccgcacgagatccttctcgtggtcgacgcgatgaccggtcaggatgcggtcaatgtcgcctcgactttcaacgagacgctcggcattgacggacttatcctgacaaagctcgacggcgacaccagaggcggtgctgcactctccgcgcgcgctgtcacgggcaagccgataaagttcatcggcgtcggcgaaaagctcggcgatctcgacaccttccaccccgaccgcatggcttcgagaatcctcggcatgggcgatgtcctctcgcttatcgaaaaggcggagaccgctattgacgagaaaaaggcggcggagctcgaggagaagataagaaagaacaagttcgacctcaacgacctgctcgatcagataacccagcttcgcaagatgggctcgattcaggacacgctcgcaatgctcccgggcatgggcaagaagctccagggcgtggacgttgacgagaagcagttcgaccgtctccaggcgctcatccgctcgatgaccccgaaggagcgcgagaatcccgacataatcaacccctcccgcaaaaggcgtatcgctgcgggcagcggacagaaggtcgaggatgtcaacaggcttctcaaccagcacaagcagatgcagaagctcttcaagcagttcaacggcaaaggctcaaagaaaaagatgcgccgtatgggcttcgacccgagcaagctcggaatgtaaaaacggatgttatcctataggtcagccttagggtttacattatatattaattttgtattatttttcggaggtacaatcattatggcagttaaaatcagacttcgccgcatgggcgcaaagaagaaccccttctacagaatagtcgttgcagattcgagatatccccgtgacggcagattcatcgaggagatcggcacctatgatccgctcaagactcccgctgatgtgaagatcgacgccgacaaggcaaagcagtggatcgccaacggcgctcagcccaccgataccgttaaggatatcctcaagaagagcggcgtcatcgactgataacgctcagcgtaaaacatggctctcggcagtctgcggggagttttgtttttctatgaaaggaacatcgaaatgaaggatttacttatatccatcgctcagggtctcgttgaagagcccgatgcagttaccgtcaccgttgacgagccggatgatgagggcgttacagtctatcatctccacgtcagcgagaatgacatgggcagagttatcggcaagcagggcagaatagccaaggctatccgcactgttatgcgcgctgccgcaacgcgctgcgatgagaaggtcgcagttgagatagactgatgataaaggactatcttgaaatagggcagatagtcggcacccacggcgtgcgcggggaactgcgcgttcagtcgtggtgcgattcgcccgaattcttcaaaaagttcaaaacgctttactacgacgcacacggtgaaaaaagcgtgggcgttgtttgcgctcgcccccacgggaatattgcgctgctgcgcctcgacggctgcgacacggtcgaaaaggcggcctcgctcagaggcaaggtgctctatatgcgccgcagcgacgcgcatctcaagaaaggcgactggttcatagccgagctcatcggctgccgcgccgaggacgcaaacagcggaaaagtctacggaaccgttaccgatgtcagccagaccggagcaaacgatgtctggcacataacggatgacaacggcaccgagactcttatccccgcaattcccgatgttgtctcgagcgtcgatgtagagaacggaattgtcctgataacaccgctgaaagggctgttttcagatgaggattgatattcttaccctcttcccggagatgtgctgtgaggtgctcagggagagcgtcataggcagagcgcgcgagcgcggctgcgttgaaataaactgccgcaatatccgcgactatacgctcgacaagcacaaccgcgtcgacgattcgccctacggcggcgggacgggcatgataatgcaggtgcagccgatatatgactgctatgagtccctttgccgcgacacgggaacgcgcccgcatctcatatatctgaccccgcagggaaagacactgacccaaaagcgcgtggtcgagctgtcgaagctcgacaatatcgctctgctgtgcggtcactatgagggaattgacgagcgcgttatagaagagatagtcgacgaggaaatttcgattggcgatttcgtggtgacgggcggcgagctgcccgcgcttatgcttgcggatgccgtcgcgcgtatgctccccggtgtgctcgctaacgaagatgcattcgagctcgagagtcatttttcgtccctgctcgaatatcctcagtacacccgccctgtcgaatggcacggcaaagaggtgccgcccgttctgctctcgggtcaccatgcaaacatcgagaagtggcgcagggaacagagccttgagcgcacctaccgccgcagacccgatatgctcgaaaaagcggagctgagccgaaaagaccgagcgtttctctcgtctttgaagagtgaggactgattcccgaagacaataatttaatgtgcaacctgcattaaaaagatgtgtcttgtatggtcaaaatacacaacaaagcccccgcccgaatttttaactttggaacaggcaacgaattatcgcctttgagggcgaaagtcgcaagtaaattgttgacggggacaagttttatgatataatatataagcagtagaataaaatttgaatttgtgtgtgggagattatatattatgtatgttaaagatgttatggtacagaatcaggtaggacttcatgcacgtccggcaacttttttcattcagaaggctaacgagttcaagtcttccatctgggtggaaaaggacgagcgcagagtcaacgccaagagccttctcggcgtgctttccctcggcatcatgggcaacacccagatccgcatcatcgcaggcggccccgacgaggagcaggctgttgatgagctcgtgaagcttgttgagtccggcttcgccgagtaatatcattttaatacagataagcaggcttaggcctgctttttctttttgtctattttcatcgcttcgcggcatataatacctttgagaaggatattttcggcggtgatagtatgttttcggttctcgttattgctgacgatgccggctttttcaggcgaaggcggctgttcagggctccgcaggtgcgcgatgtgcgcgtatacggcggtctgccgtttcgcgagataatttcagccaggcggcgcggaaaaataaaccgcgcggcgatatgcgaagcggctggcagatgttcgggcacaatgcttctgcctgaagatatagcgcccggcggcgggatagacgagcccgatctctccgattacagaaagctcgttttcttcaacactgcgtgctctatattgcgctcgtcctgcgggtgcggagtgcgcggcgagctgctgataaaagacaaaaacgcctccgctgcccagaggctcggcattgcagtgccgctgttttcggatatccgcgtcgcgacttcgtgcccggacgggtattcgcgcccgatagaaaacgccatggacgaattcggcgcggcggttctcgacggaatcagcgacagcgcggatgcagttatcgacctcgattcgtcgcccgaaaagtttgtctgtggcggcgaagtttttacggcgggaaaaataacgctcccgagcgcatatgcgcgtctcatgccgacgggcgcggactcgcttgaattcgcgggtgcgctttatcttataagccgaatccactcgctcgcgcagctttgtttttccgaaatatatcacggcggaaaaccgctttctctgcgcgccgcgtcggagcttataaggctctcggcggcgccgtaaactattgacaacaggcaataaaatgaatataataacaatattgtggataagtgcctgaaaaggccttagtgtatcaatttttaaaatttaaggaagaaggatggccttaaaatggaaaagcagatcgtattgacaagagagagctacgatgccaaggtcaaggagctcgaacagctcaaaaccaccggcagagatgagatagccgagcgcatcaaagttgcgcgttctttcggcgacctttccgaaaactccgagtatgatgaggcgatgaacgagcaggcgaagctcgaagctaaaatcgcccgccttgaaaacgacatccgcaacgcgaatatcctcgatgaggacaatctgaatgcgggcgtggttcatcccggctcaaaggtcaaggtcgagaatgtcgagaccggcaagaagagcgagtatactatcctcggacccagcgagtcgaacccctctcagggcataatctccgaccagtcgcccataggcaagtcgcttatcggcaaccgcaagggtgatgtagtcgatgttccgctgccgaccggaaagattcttcagctcaagattctcagcattgcaaagtcaaagtaaaaaaagcacagttcacataaatccaaggagtgaaaaaaatgccggatgagataaacaccaaccccgtctccgccgagagcgaagaggctcaggaggacataaacgccttgcgtcagatccgcctggacaagctcaacgagctttgcgccgcaggggaggatccgttcaagataacaacagcggatcagtccgcccatgcacaggagatagttgacaatttcgaagcgatggagggcaaagaggtctccatatgcggacgaatgatgtcaagacgcgatatgggcaaggcgaacttcatcgatatccgtgaccgctcgggccgtattcaggtctatgtgcgcataaacgatgtcggcgaggatacatttgcaaagttcaagaagtgggatatcggcgatatccttgaagtgcgcggcacggtgttcaagacccgcaggggcgagatatccatccacgcaaccgcgcttcgcctgctgacgaagtcgctgctcccgctgcccgaaaagtttcacggtctgcgcgatacggacacccgctatcgccgccgctaccttgacctcatagtcaaccccgatgtcaaggatacatttataaagagaagcctgataatccgcgagataagaaactatctcgattccaaggatttcatcgaggtcgagacgcccattcttgttcagaatgcgggcggcgctgccgcgcgtccgtttgtgacccatcacaacgccctcaacgaggatctcaacctgcgcatttcccttgaactctatctcaagcgccttatagtcggcggacttgagcgagtctacgagatgggcagagttttccgaaacgagggtctcgacgtgcgccacaatcccgagttcacgctccttgagatatatcaggcgtatacagatttccacggcatgatggaccttgtcgaagagctctacagaaccgttgctctcaaggtcctcggcactgccgttgtcacatatgacggcgtggaaattgacctctccaagccctttgcccgcatgacgatggtcgaggctgtcaagaaatatgcaggcgtcgacttcgctgagatcgatcttgaaactgcccgttcgctcgctaaggagcacggcatcgaatttgaagagagacacaagaagggcgacctgctcaacctcttcttcgaggaatatgttgaagacaagctcgttcagccgaccttcatcacggagcacccggtcgagatttccccgcttgcaaagagaaagccagacgatccgaactacacggagcgtttcgagctgttcataacctgccgcgagatggcgaacgccttctccgagctcaacgatcctatcgaccagcgcggccgctttgaggctcaggaagagctgtttgccgccggcgacgatgaggcgaaccacaccgacgaggacttcctcatggctctcgaatacggtatgcccccgacaggcggcatcggcatcggcatcgaccgctttgccatgctcctgaccgacagctactcaatccgcgacgttctgctcttcccgacgatgaagtcgcttgacggcgatgcgtccaagaagaccgcggttgtcgaagaggaaaaagaggaggagactcccgagacagtagacttctcaaaggtcgagatagagcctctcttcaaggattttgtcgattttgagactttcagcaagtccgatttcagagccgtcaaggtcaaagaatgcaccgcagtgcccaagagcaagaagctgctcaagttcgtcctcgatgacggcacgggcaccgaccgcattattttaagcggtattcatgcctattatgagcccgaagagcttgtcggcaagacgcttatagccataactaacctgccgcccagatcaatgatgggcatcgattcgtgcggaatgctcctgagcgccgtacattcggaggagggcgaagagaagctcaatcttcttatggtctccggccgcatccccgcgggcgcaaagctctattgatatatgaaaatatcggttgctcttgccgcatataacggcgagaaatatataggagaacagatcgaatccatactccctcagctcggcagggacgacgagatagtcgtcagcgacgataaccccgcgggcaagacccgcgcggcggtcgaattctattcggcatatgacgggcgcgtcagatatgtcgaaggcacgggcgagggcgtatgcagaaattttgaaaacgctattctcaactgttcgggggatgtaatcttcctgtgcgatcaggacgatgtctggctcccgaacaaggttgagcgcgtcatgaaagcgattgaaaacggcgcagacgtcgtgctgcatgacgcaatgatgacggacggggaactgaacgtcaccgacgaatctttcttcagcctcaacggctcgaagaggggatttgtcagaaactttctgaagaattcatatatgggctgctgcatggcgttcaggcgcgatttcgagcctgcgtttatgccgttccccaaaaatctcgccatgcatgactggtggataggactcaacgccgagctaaaaggcaaggtcgagttcatatacgagcctcttatcaagcatcgctgccacggcggcaatgtgacaggaggcaagaccaccgccgcgcagaagatatcctggcgcattcagatggcgggagatatactgcgatacaaaaacgcagactgacgctgaccgtgataagtcagcactttaaagaggtgtgaaattgggaagatataaggtcacggggtgcatagtgacgcacaacaatatgcattccatcaaaaagacccttgattctctgctcgagttcacccgtgccgatttcaagctctatgttgtggacaattcctcaaccgacggcactccggaatttatcgagcagaactacccgcagcttgagcttatccgcaacgccggaaacaccggcttcggagcgggtcataatctggtgatggacaggcttgattcaaaatatcatgtcgtcataaatccggatattacagtaaagaacgacgcgatatccgcccttgcggactatctcgaagagcatgaggatataggtatgctcgccccgaaaatctgtttcccagacgggcgtatgcagatcctcggcaagcgcgacccgaagataaaatatctttttgccagccgcctgcgcaacgaagagaagccgggcaggctcctgcgcgaatacgcaatgctcgacgaggactacacaaagccctttgacattgagaacgcctccggatgctttttcatgataagaacggagctgtttcgcaaaatcggcggctttgacgagggttatttcctctattttgaagacagcgatataacccgcaccgtgcgcaaatatgcccgcgtcgtgtttgatccgtcggttgtcgtctatcacgaatgggagagggagtcgaaacataacttcaagctcctgctcgtccatatccgctcgatgttctactatatgaaaaagtggaggtgatccggatgaagaaatacttcaagaatttttataagtaccgtttccttttcaccgagatcgttcgcaagaacattaagctccagtacaggaactcggttctcggtatgttctggacattccttcagccgcttctgacgatgatcgtgctcgcgttcatcttcggaaatatcttcggacgcgatgagtcgaaggttctcaactatcccgtatatttgctctgcggtcgtctgctctatgagttctattcccaggcgaccaagcgcgccatgcgctcgataagaaacagcgcatcggtcataaagaaggtgtatgtgcccaagtacatataccccatggcgaatgtcgcgtcgaacttcataacgtttttgatttcgcttcttgtgcttgcggtcgttatggcgtattacatgatattcaccgacaccgccatgcgcctgactccgtatattctgctctccttcgtgccgatactcatcctctttgtgctgtgcgtcggcgtcggaatgatactttgcaccatggaggttttcttcaaggatgtcgagtatatgtacgaagttttctgcatgctgctgttctatgcgactcccatattctacaatgtcgagaccctgcatataaccaacaggtatgcacagtatgcgctcatggcgaatccgctctattcgatagtctcgatgttcagggactgcgtgcttttcggcagggcgatgaatccgaaccatataatctactccgccgtcttcagcgttgcgatgctgctcataggcgtgctggtgttctacaagaagcaggatgatttcatcctgcacatctgatgggagggcgtaattatgggcaacgtaatggttgatgtaaatcacgtcagcatcagattcattcagaatcaggaaaaggtagacaatctaaaagaatatttcataaagctcgtcacccgcaagctcaggtatgacgatttctgggcgctgaccgatgtcaatttccagatcgaaaagggcgaacgcctcggtgttctcggcttcaatggagccggcaagagtacactgctcaagactgtcgcaggcgttctcaagcccaccaagggcacggtcacgacaaagggcgttattgcccctctgcttgaactcggcgcgggctttgacatgaactacaccggcaaggagaatgtctatctctacggcgcaacgatgggctattcgagaaaatacatcgaggagcgctatgatgagatagtcgaattcgccgagctcaaagacttcatgcatgtcccggtcaagaactattcctccggtatgcgtgcgcgtcttggcttcgcgatagctactgcggtcgatccgcaggtgcttattctcgacgaggtgctctctgtcggcgacgcccgtttcagagccaagagcgagaaacgcgtcatgtcgatgtttgaaaacaatgtaacggtgctcttcgtctcgcactcgacagaacaggtgcgcagactctgcaacaaggccataatcctcgatcacggcaagatgatagcttccggaacgagccaggaggtctgtgatatctacgaccgtatggtcaagggaataaaataagaaagggtgtttttcagatggtcataggagcgatttttgccggcggtatcggcagcagaatgggcagcgcagatatgcccaagcagtatctccagctcggctcaaagccgataatagtccacacgatagagaagtttgtcgtcaatcccggaatcgaccgcataatagtcctctgccccaaggcatggatagcccacacgaaggatctcgtgaagaaatatctcggcgaggctatcgcagagaagataaatgtcgttgagggcggctcaacaagaaacggcacgctcgaaaacgcgctcaagttcatcaacgagaatttcgccattgacgatgacagcgttattgttacccacgacgcagtccgtccgtttgtcacccacagaataattgacgaaaatatcgaggctgcgaagaaatacggcgcgtgcgacactgttattcccgcaacggatacaatagtccgcagcgaggacagcgaaaatgtcagcagcattccgaccagaagtgagctgtatcagggtcagactccgcagtccttcagaataaaggagcttgagagcgttctcaacagcctcaccgaggacgagaagaacacgctgaccgatgcgtgcaagatctatacaataaagaacaagcccgtccgcatcgttgacggcgaagtgttcaacatcaagataacctacacctatgatctcaaagttgcaaacgcacttctgggggttgtgaacaatgataaatgaagtatatcagcttatagcgcccaagctcattgacacggcgtacaaggagatagacctctcgaagaacgaggtcattctccgccccgtcaagatgtcgatatgcaaggcggatcagcgctactatcagggtctgcgcaaccgcgccgtgctcatgaagaagctgcccatggctcttatccatgagtgtgtcgccgaagtaatatatgacccgagcggcgtgttttcggtcggcgaaatgctcataccgatacccaatacacccaccgagaccgacccggtcatcgccgagaactatctgcgttcgagccacttctgctcgagcggatatgacggcttcatgcgcgactatatccagatgccccacgaccgccttgtcaaggtgcccgagggcttcgatatgcgcgttgcctcgttctcggagcttgtcagcgtcagcgtgcagtccatctcgcgcttcgagaagttcgcgaattccaaccgccgcagaatcggtatctggggcgacggaaacgtcggatttataaccgcattgatgctgcactatctctatccgaacgctgagctctatatcttcggcacggttgaggacaagctcaatttcttcacctttgcaaaagagacattccatgttgacgcggtgcctgagggagtcagcatcgaccacgcgttcgagtgcgtcggcggccccggctcaagacccgcgataaatcagatgatagacctcattgagcccgagggcagcatttcgctcatgggcgtcagcgagaacttcgtcgatatcaacacgagaatggtgcttgaaaaaggtctcaatctcttcggctcttcgcgcagcggcaggaaagatttcctgcgcacgatgcagattttcgcagagcatccggaggtcggacactaccttgagaatcttatcggcgatgagttcaaggttcgcgatatcccggatatccacaaggcgttcaacgccgactatatgagaaacttcggcaagaccgtcatcgattgggacaaataatgaaaaagctgttttatactatttacgcagtgatattcagaatatgccgccttttccctgttaaaaggggaagggtggctttggtatctccgcacaacgcggatttcaacgattcgctcggcgcggtcaagacggagcttgagaggcgcggaggctatgatataaagctcatcacccgccgcgacatcgagctttcaaagaacccggcgaagctcataaaaggcgcattcaggttctttttcgtcagctcataccgccttgcaacagcgcagtatgtctttttgaacgacaattttatgcccctcgcctatataaatttcagcccggagacgaaagttgtccagctctggcacgccgagggcgtgttcaagcgattcgggctctgctcggcgcttccgccggagattgaggagcttgaaaagcgctgctgcaagcgatatacccacgcggtctgctcgtcaaaaaatgtcgtgccgtattatgccaaggcgttcggcttgcccgaggagcgcgtactgccgctcgggagcgcgcgcacggacagattcttcttgccctctgacaccgaaaagctcagagcggagtttgacgaaaaatatccgcagtgcaggggcaaaaaactcgcactctatgctccgacattccgtgacgacccgaagcgcgacggcgagataatgaaaaacttcgacgcgaagaaatttgcggagtgtttttctgatgaatatgttctgctcatccgcctgcatccgcaggttcacacggacgaagtagaggcgggcgagagcgcgatagacatgacgggatatccggatgtcggcgagctcgttcagatatgtgatttgctgataaccgactattcttcaatatgcatggatttcgttctgctcggaaagccgtgtcttttctatgcattcgacctcgaggaatatgagcgcgagcgctcgttcttcttcgattatgaagactatgtgcccggcagaacggcaaaaacttttgacgaactgctcgatgtgatatcaggcggcgatttcggaaaagacaggcaggagaagttcaaaaacttcaattttgacgccctcgacggcaaaagcgccgagcggatagtcgatgcgatagtcaaataaaggcgcagcacttgacagactgcgagcttttattgtataattaaccgttagaaacaagctttatcagatagtcaaaggagggacgcgcccggggcgcggcttatatgtcaggacattcaaaatggagtacgatcaagagaaagaaagaaaaaacggataaccagcgcgcgaagatcttcacgaagatcggccgcgagatagccgttgcggtgcgtgagggcggccccgatccggcgtcgaactcgaagctcaaggatatcatttccaaggctaaggcgaacaacgttcccaacgacaacatagaccgtattattaagaaagctgccggcgacggcaatgcggacaactacgaggagatcatgtacgagggctacggcccgtcgggcatcgccgttatagttgagacccttaccgacaaccgcaacagaactgcgggcgatatgcgccattatttcgacaagttcggcggcaacatgggtcagagcggctgcgtctcgttcatgttctcgaagcagggcgttatcgttatcgaaaaggacgacgatatcgacgaggagaagctgatggaggatgcgcttgaggcaggagctatcgacttcctgaccgacgacggcgtttatgatatccgcaccgagcctaacgatttctccgcaatatgcgaggatctcgagaagaagggctacaccttcctctccgcagaggtcgagtatgttccctcgagctacaccagactcgaaaatgaggacgatatcaagaatatgagcaagatgctcgagatgttcgaggataacgacgacgttcagaacgtctggcacaactgggaaaacgccgacgacgcagagtaaaatcaaaaaagacgagagctgccaatatggcggctctttttgtgttaactaaaaaggacttttgccttcgctacgtactataatcaaaagatatatactacccgcgtttcggcattttctttttatttgaaaaagaaaacgcctgcaaaagaaaagcaaaacagggggaatccccctgtacccccgacaacgccgcgccgcggtacatagcttgcggctctcagttagttgctcggcactttcgcacgcaaacgcgccggagcttgaacgagtgcgtgctcgtgcgtcttgcttcgcaagccgttccctcgcctgtctcaattggcttatcaaacactgcggcgcggctattgaaagcatgattaaatagggcggatagtatttatattttagcatgagcagggaacggtatattcgtgaaaataaattcggggtcacgaagcatgagctatatcgtagagactaatattcttttctgccgttttataacgagttacgactgtattgttttgatgacgtaaaattcagtttaaaatgggaaacccccagagcaccggaagctctgggggtgatggggaactgatttgccgtcgcccgcacaagcggcggcaatcgagaagttgttttgttttttatccgttcagaacacttttacggttcggttctgccggaggtcgaactgcctactgccgccactgacatgacgactgccaataccaagatgattcctaatgcctgtaataccattttgttgtcctccttaaccgtttcgtagtttctctttcctacgatacatagtatataccgaacagggggctaaagccaccacaaaacgattacagttgaatacaaaatggttacaaagaaagattaaattgtaacatttctgtaacaatttcaggcgaatttgtcaacttgtcagctcgatgaggtcttttatgctcagctccggctgcaaagcgcggtttacggcgagcgagagcagtcccgaacagcgctcgataagcaggtctatctctttcggtgtgaccatcatttttgcgtcctcggcaggttcatttgtgctattacccgacacatcgcgggcgagtgtgttcgcatcaacgaccgtcggaacgcccacggatatgaccgggacgccgagcgtttttcggcttatctcggcgcgggaattgccaacacccgagccggggattattccgctgtcagatatctgaactgtgctcccgagcctgccgagcttgcgcgcggcgagtgcatcgacgactatcacggcgcagggctttatcacattcaccgcgccgagcagcagctcgcctgtttcgactcctgtctgaccgagcactccgggggctatcgccgcgaccgggcgcagcctgccgagccccagctgctcgcatagctcgcgctttaggtgtcttgtgacaaacacgccgccgataaatttggggccgagcgcatcgggggttatattcgtgttgccgagccccgcggcgagcaccgtgccctcggacgggagcaggcgagagagctcctgcgccacggcatctataagctcgtcgcttatgcgcgaggagcgcgcgaacgactgcgactgcacggttatatattctccgcgcggcttgcccaatatttcttcgccgcgcctgtccgtgactcgcaagcgggttatttccgcgcccgcgctttcaaagctcgtgcattccacgccgtctattctgctgccttcgagattttcgcgcacttcgagcgcaaggtctgttctgaagttcattttttcgtctccgtttcgctttcgcaggggtgcgaaaggcaaaaattttttctttttctcttgcattttggcaaagtctatgataagattattaactgtatgatgaaggaggtgcaaaaatgcctaatatcaagtcagctaagaagcgtgtcatcgtcaacaagacaaaggccgcccgcaacaagtcccgcaattcagcccttaagactgccataaagaaggctcacactgctgctgagaccaacgcggcagataagaaggaagttgtcaccgcagctataaagaaggtcgatcaggcagccgccaagggccttattcataagaacaatgctgctcgcaagaagtccgctcttgcaaagcttctcaacgaggcgtaagattgcaaacaaattattaacggttctggcttttgccatgaccgttaatttttttttactcttttcgcgatttttctttttgatgcggcataatatccatttgtaaatttttatcgtatggtttgacttttgcctgcgtttggcgtataatcataatcgataagaatcaaacaggaggtgagaccatggacaaggccaagaagataatcaagatcgtcgctatcatcatcgctgttgccgccgctgttgtcggtatagcgtttgccgtcaagaagatcatagacaagaagaaggctgctgccgacgagccggagaattatgtctcctgctcctgctgcgatacctgcgcacccgcagccaactaattttttgaaaaaatttcacctgctatacgctattgtgtatggcaggtgactttttcttatttttcctttggtctcgcaacaaatgacgcgataagaccgcagagcaccgccgcggttattcccgcgctcgatgcggtcagaggacccgtcaggatgccgagcgcgcccttttcggcgatagcctccttgacaccttttaccatggcgaagccgaagcctgtcagcggaaccgttgcccccgcgcccgcccattttgcgagcggagcatagattccgaccgcgccgagcacgactcccgccacgacgaagcagacgagtatgcgcccgggtgtcagctttgtcagatccattattatctgacccaccgcgcatatcgcgccgccgaccgcgaacgccttgagaaagctgagaaatatatccatatcatcacccgaaagtatttttttcaaatctattttttccccgcggcgcggctatattcacgccttttgtatcggggaaaaatacacactgtgaaattaataaaatttttacagataaagtattgacaaacggcgataatattaataatatctatactataagaggcacggaaattaattccgctttcctcgaaaacaaaaggttgattttaaaattatagtataaggagaaataaaaatgtcaacttttgaaagagtccagaaaatcatttgcgagcagctcgagatagacagccatcttgttaccgaggatgcatctatttccggagatctcggcgcagacagccttgatcttgtcgatctctctatgtccatcgaagaggaatttaacctcgaagttcccgacgatgttctcgatcatgtcagaactgtcggcgatatcgttaagttcatcgaagacaacgcgtaaatataatcaataacaaaggggctgttttgtattggattcaatatgaaacagccccttttgccgcaacggagggatataaaatgatactgaagaatgcggatattttcgattccgagtttgctctgcgtcgcgcggatgtgcgcgttgaggacggcaaaatagctgaaataggcgaaaatttaaacggcggggatgagcacgatctttccagatgcgttatcctgcccggctttatcgacatacatatccacggctgcgggggagcggatttctccgacgctcagccggatacgctcgaaaccatgtcgcggactctcgcgagtttcggcgtaacttcgttctgccccgcgtcgatgactctgccatatgacaggatagaaaaggcgtttgagaatgcggcgggatatctcggcaaggagtgcggcgcatatatccacggcatcaatatggagggaccgttcctctcatatgcaaagcgcggcgcgcagaatcccgaatatctgcatgagccggacatagacgagctcaaaaagctcgataaaatctgcaaaataagacttgtgtcgttagcacccgagcttccgggagctatagaattcgcgcgcgaggcgtcgaagatatgcacggtgtccgccgcgcacaccgccgcgacatttgagcaggcggagctcggctacaaaaacggaataacccacacgacgcatctcttgaacggcatggatccgatatataaccgcaagcccggcgcggcagtcgcggcgctcagagccgaaaacgccacggcggagctgataagcgacgggatgcatatccacccggcgtatctcgccctgctctataaaatactcggcgaggataggagcgtcgcggtcagcgactccatgtgtgcctcgggtctcggcgacggcgaatatgagctcggcggcacgacagtgtatgtaaaaggcggcaaggctctgctcgccgacggtacgatagccgcgagcacgacgaatatttttgctgagttcaggaatataatcagcttcggcgtgcccgtccgccaggcggtgaaatcctgcacgataaatcccgcccgcgcgataggtgccgacgatgtgacgggcagtatagcagtcggcaagcgcgccgatttcactgttctttcgtccgatttgaaagagctcgagtgcgtctatataaagggaaaaaggatataaaaaagtatgcaaatcgccgcttgtgtggtataatatagtatcttagactcaaagctcggaggctgaacatgaactttcttgttattgacg

SEQ ID NO: 1141 - DNA, 6247 bp, unidentified
  source 1..6247: mol_type = unassigned DNA
atgaatatgacaacaaatgtaattaacaagggttggttcaatcccatatccctttccgtattgctgatactggttatcgtatcagccgttttgtatgtttcgaagattataaacataccgatattcatcctcttgcttcttctttccgggttggtgacttctgcaatccgcatagccgaccaatgggaacgagcggtagtccttcgtatggggaaatacaacggtttgaaaggtcccggcccctttatgattatcccggttatagacagtgtatcgacttatattgaccagcgtgtacgggtaagtgcatttaaggccgaacaaactctaaccaaagatacggttccggtaaatgtggatgcagtcgtatattggaccgtctgggacgtggaaaaagctgcattggaagtacaggagtaccaaaaagcgatcgaacatatcacacagactggtctaagagataccatcggtaagcacgaactgtcggatctcttgcaggaacgcgataagatagctgaggatttgcaacaggtcttagacagaaatacgaatccgtggggcatcacatgccagactgtcggtatcaaagatatcgccattccgcaagacctggccgaagcaatgagcaaagaggcccaggccgaacgtgaaagaagagctcgcgtcatcttgggaacagcagaaacggaaatcgcagaaaagttcgaacaagccagtaagaaatataccgacaatcctgtggcattgcatcttagagggatgaatatgctgttcgaaggcttaaaagaaaaaggatcgatggttatcgtaccgagttcggcactcgacaccatgaacttaggggctatgggaggcttggtttcattggctaagaacaacgagacaccgaaataaactattttctaacaacaaaaaatcaccatttatggaaatacacaaacaagggattacttttgtactccttctattaatctttacaaattgttcacgaaaaccatcgctgcaatggattcccttcagttgggaaggtgatacaatttcggggatatacattgaaaaagcttttctaaatgttccggtaaaaatagagaatttaccctacgaattcacaatgcagtttgatttaggagcatataattctgtcttttacgggaatacttttgctccttatctcaaagaagccccatctttaatgaacaaaaaagattcaaccgggatgtataagaatgtcaacctgcaaatagggacagtggagtttagcaatgccaatatcggattcatgcagaatttcggaaataaaatccctaaagattcacttcattcaaatacccccaagcatattggaacgatcgcatccgacatggtgcaagataaagtcttaatcattgattacaaatcaaacaggcttgcaatcacagactttttaccggctgaatacgaaaatctgctggctgaagaatttgaatcagaatatggggaaataaaattgcctttacggattaatggaaaaacatgtaaagtattgttcgatacaggttcaagccctttccagttaataacgacacaagaaagagcttggagcgtatcagaccttactattgtcgactctctaagcggtcctttatggtggggacaagaaataacattttatggctttaatgtaaccaaaccgatcgagttcggcggaaaagccttgaacaattcgaaagtctactacgccaaagacggcctttgggatagtatttatagtaccctcgatgtctggggaataaccggaaatgcttatttctttgaaaacaccgtgattatcgattacaaaaacaaactattcaggataaaataaaaattcgaacccatacttcttcattcagatgcaagcgtaagttgttttctacattgccgtatatattcccgacaacgtcaaatatattctcgacaacgtcgaaaacaacttacacttgcatcaaaacaaaaacacattgccatcttacatcaaacctttgccagagcttggtctaggtcatcaatgatatcatcgatatattcagtacctatactcaggcgcacagtggaaggagtgatatgctgtccggccaactcttccggagtcatttgagaatgggtagtcgtatacggatggatcaccaggctcttcacatcagccacattggcaagaagggagaatatttccagcgaatcgataaacttccaggccgcttcctgcccgccttcgatctcgaaagtgaaaatacttccggcacctttcgggaaatactttttataaagttcatggtctggatggtctggaagagccggatggttcactttggttactttcgggtgtttggataaatactcgacgactttcagagcattggcaacatgacgttccacgcggagagacaatgtttccagaccttgcagcaggataaaagcattgaaaggcgagatcgtagctcctgtatcacgcagaatgacagcccggatacgagtgacgaaagctgtcggacccgccacatcggcaaagaccgccccatgataacttgggtccggtttgcccaaggtcgggaacttatcggcatttgctttccaatcgaaattgccactgtccacaatcactcctcccaagctcgatccatgtccgccgataaatttggtggcggaatgaacaacaatatcggccccgtgctcgatcggacggatcaggtacggtgtaccgaacgtattatccactatcaacggaatattatgacgatgggccacctccgccacagcatcgatattggtaacatcagaattaggattaccgaacgtttcgacatacaccgctttcgtattctcccggatagcagcctccaacgcctgcaagtcattgacatttacaatcgtgtgggtaatgccctgagtcgctaacgtatgcgtaatcagattgaaggaaccgccatagagattgtcggcagccacaatatgatcactcactccaagtatattctgcaaggcatacgtcacggccgccgcaccggaagccaccgccagaccagccactcccccttcgagagcggcaacacgcgcttcgaaaactccctgggtcgaattggtcaggcggccataaatattcccggcatcacgaaggccgaaacggtctgccgcatgttgtgaatcatgaaatacataagatgttgtctgataaatagggacggcacgagcatctgttgcgggatcggcctgttcttgccctacatgaacctgtaatgtctcgaaatgtaatttctttgttaccatagtcgtattattttaaattgttcttcttgctcattttccagcaaaactatagcagacagagatatcagacaagatatatggaaaatacagaaaataacgctatttttacggtcgtcaacagaacgcataaactgtatcaggatcgaaaaaaggattctgatagaattttattcttatgaacacacttgagaaattagacaaagtagacttgcagatcctccgtaccctgcaatcgaatgcccggctcaccacaaaagagctcgccgcgagtgtcagcctctcgtcgacacccgtattcgaacgcctgaaacgcctcgaaaacggaggatatataaagaagtacattgccgtgctggacgccgaaaagctaaaccagggcttcgtggtcttttgcagtgtcaagttgaggagactgaacaaagagattgcggcggagttcacaagaatcatacaggaaattccgcaagtcacagaatgctacaatatatcgggaagttacgactacctgctgaagatccatgcaccgaatatgaagtattaccaggagtttatcttgaacgtgttaggcacgatcgacagcctcggatcgctcgaaagcacctttgtgatggacgaggtaaagcatgaatacggaatccatatttaaacgccgccccgtccctatcttacatttattacttcaatgcataaatccgctggatgatgtccacaaccttcatgccttccaatacgttggtcgtaatacattccgaacttgcaccggaaaggacacggaccacattgcggatcacgaaattatggttctgggcggaacctttataagggccgtagtcatttcccggattcgtcggcgccagttccggcatttcataatctttgatatggcagtattcgacttcgttcatatactgtccgccgattttcacgcttccgttctccgcaacaatcagcatactgctttccatgttcctgttccagacagaagtggaatagctcaggctccccatcccgccgttcacgaagttgaaattcacaaagcccgaatcttcaaaagccgtaagtccggcatggttgaaatcggcaaagcgagcctggatattgcagatatccccgaaaagccagtacataatgtcgataaaatgggagaactgggtaaaaagcgtccctccgtccaaagcggcatcgccatgccagccaccgggtttataatagcgctcgtcacggttccaataacaattcaactggaccatatagatcttgcctaacctacccgaatccaccatctccttgatccagacggaaggaggagaataacggttttgcatgacgcagaacacctgtttacggtatttcagcgaagcatagaccaccttctcggcatcggcaagcgtcagtgccatcggcttctcgatcacgacgttgcaaccggtttcgacagcctgaatggccattgctgcatgcaagccgttcggggtacaaacatttacgacatctatggaaattccgctctgcaatagctccgtcagggatgaaaaaaacgggacatcgtatgcctcaatacccaattcctcacagggacgaatatcacaaagggccaccaattcggctcccggatcgcgtgtcaccatctcggcatgacgtttgccgatatggccacaaccgataactgcaaattttatctttttatccataagcattcgatggggggggtgtcaaaatctccttgtccccgtgcttgacgcggggccgcaaaaggacagaccttatcaatcagatttttatagggtcggttctaatgcgatcccacgtcaagcgcgggaacaggatagtttcgacacacccccttttttagagtttctgttatatattgctgttgtccgagggacatttccgtatgaataggcagggaaaggacggattcgcacaaacgggtggagacgtccaaattgccggatacacgggagatatgccggtaagcttcctgatgatgcactggtacaggataatagatcatggaagggattccctgttctttcaacaggcattgaaggacattccgcctgccgtcttttacctggaccgtatattggtgatagacatgagtcgaaaatatcgatctcgcagggagaaccaacgaatcgcaggaggacaaagcttcatcataccgagaggcaacttgccgacgggtttccgtgaactcctccagatgcttcaacttcacatccagcacagcagcttgcaacgtgtccagacgggagttgcatccgatccgcctatggtggtatttgcattcctggccatgattggcaatcatgcggatacgggcagccaacgcctcgtcggaagtcatcaacgcccccccatcgccatagcaggccaacggcttggatggaaaaaaagatgtcgtcccgatatgtccgatcgtcccggcctttcgtacccgcccgtcggaaaagatataatcggcaccaacagattgagcgttatcttccactacatacagatgatagacatctgccaaagtcatgatcggctccatatcgcaggcttgtccgaacaggtggacggccacgaccgcctttgtccgttccgaaacagccgcttctattttccggggatcgatattaaaggtacagggatcgacatccaccaacacgggcgtcaaccctaacaaagcgacaacctcggctgccgctatataagtaaatgccggcagaatcacctcatcgccaggctgaagctccaatgccatcagagcaatctgcaaagcgtccgtcccgttagcacaaggaatcacgtatggaacctgaagataatcagccaaatgcccggcaaaggatttcacctgcggaccattgataaaagcacaactgtcgatcaccgcctgcatggcctcatcaatctcctctttgaaccggagatattgtccatgcaagtcgaccatctgtatctgttcttccaacat

SEQ ID NO: 1142 - DNA, 21894 bp, unidentified
  source 1..21894: mol_type = unassigned DNA
gtggcaggccaatggcggcaccggcgggggaaacatgcttaaagctggcagcagcaggctggcccagggcttttttcaggtcgcgcaccagctggtagctgttgaacgcatccagaaagttgatgtagcccggcttgccattcaaaatggtaacgggaagatcagaaccgtctgccataaaaatgcgggcaggcttctggttggggttggtgccgtatttcagctggaattcattcataagttcagccctccaccgtgttgtatttgttcaggatcacatcttcataatcgccggtttccagcgtgatggcacgcacaaacaggctgaccttattatcttcgttcagggcttcccacaactttccggcaaattcgtcggcatcgttctggtccagtgtcacgcgcagcggctcaccggcaaagctggggatgggggagccgtttttctggtaggtggtaatcagctggccttcgcctgcaacgggctgcggatagtcaaaggtctggcgctgcacgctggcggggttgccatcgcagcttttcaggatgctcagcttgtagccgccgcaacgcatatccacaacgccggaaatgcggggggtaaagttgggggcatcgtcctcaaaagtgcgggtggcaagggctgcttcaaagccgtaaccagggaacaggttatcccgcatgtagcggtaaatggtatccgtctggtcaccgttggtcacaatggtggtatcgttcagggtcagaaccgggttatagatgatcaggtggggatcttccagcttggcggggtctgcggctaccgtgcggatgccgccggggatggcgtcaaacacgcggttgcggctgttggcgctgcggcccatgatccagtaagcaatcatggccttggtgccgtccggcgaacggccgatgcagatgccgcggccgggatattcgttaccggccagataagtataaagattctttttcatgcgggaatcctccttgttcggtcaggcttcgccattgcacaccatggcaatggcctggggcagcaacttccattcggcttccaccatcacgcgcttctgcagcacttcgggggtatcaccgggctgcacttccacggctttttgcagcaggatgggcccgccgtcacacactttgttgacaaagtggacggtagcgccggtcactttcacgccgcgcttcagcgcttcctcatgcactttcaggccatagtagccggggccgcaaaagctgggaatcaggctggggtggatgttcaggatgcggttggggtaagcggcaatcacgctggggcccagcacgctcaaaaatcctgccagaaccaccagctcaatgccatggtctttcagcacacgcagcagggcagtgtcaaactcctcgctggtggcgtaatccttgcggcgcaccacggcggtttccacgccgaagtttgcagcgcgttccaacgcatacacaccaggtttgctggcaaccaccagggtaaccttaccgttggggttctccccgcggcgttcgctttccaggatggcctgcaggttggtgccgccgccggaaaccagcacagcaatcttcatcataccagctgcaccccgctgccttcgccaatcacaccaaggcggtaagcatcctcgccgttggctttcaggatctcaatggccttgtcggcatcctcggcagccacggtcaaaatcataccaacgcccatgttgaaggtgttgaacatatcgcgctccggaatgttgccctctttagccagcacatcaaacagcacgggggtgcgtacatcgctcttcttgatcacagcgcagcagccggctttcaggctgcggggaatgttctcgtaaaagccgccgccggtaatgtgggaaacgcccttgacggtaacttccttcatcacggccagcacaggcttgacataaatcttggtgggggccagcagggcttcgcccagggtcttgtccatgccgtcaaaggtctttttcagcacatcggggttgttctccaggtcaaagatcttgcgcaccagagagaacccgttggagtgtacgccggtggaaggcagggcgatgatcacatcgccgggctgcatggtggagttgtccaggatcttgctcttgtccacagcgccaacggtaaagccggccaggtcgtactcgtcctccgggtaaaaaccgggcatctcggcggtctcaccgccaaccagggcacagccagcctgcacgcagccttcggctacaccggcaaccagctcggcaatgcgctccggcacgtttttgccgcaggcgatgtaatccaggaacaccagcggcttggcaccggcgcagatgacatcgttcacgcacatggcaacgcaatcaatgccaacggtgtcatgtttgttcatgtactgggcaatgcgcagcttggtaccaacgccgtccgtgccggaaatcagcacggggtggggcatatcggtgcagtccagctcaaacaggccgccaaagccgcccaggccgccaatgcagtgctcgttcatggtgcgggcaacgtgctgcttcatcaggtcaactgccttgtaaccggcggtaatatccacaccagcggcagcgtaacttgcagaatagcttttttccattatgtttctctccttatcagcttacaggcgttttttggtctgggactggctcaggggtttatcgtatacaatgtccatcgtctcgttgggggcgggcaccgggtaatggccggtaaagcagccggtgcagaacccgcacttgctgtggatggccagctgggtcacatgttcaatgctcaggtagcccagggaatcggcccccacgatctggcggatctcctctaccgtatgaccggtggcaatcaggtctttttcgtccgggatgtcggtgccgaaatagcaggggtgggcaaacggcggggccgaaatgcggtagtgtacttccttggcaccggcgtcgcgcagcagcttgatggtgcgggcgctggtggtgccgcgcacgatggagtcatccacaagcacaacgcgcttgcccgcaacggtggaggaaattgcgttcaatttgatgcgcacactgctttcacgctgggcctgggagccctggatgaaggtgcggcccacatatttgtttttaataaagcccacgccatagggaataccgctttcctgcgcatagccaagggcggcatccaggccggaatccggcgcaccgatgacgacatcggcttccaccggatgctcctgtgccagaaagcgcccggcctgcaggcgggcgtcatgcacgcaggtgccctcgatgatggaatcggggcgggcaaaataaatgtactcaaacacgcacatcgtgtgcggcgcagtgccgcagtgggtgcggatggtgcgcaggccggtgtagtctgccaccacgatctcgccgggcagtacatcgcgcacaaagcgggcgcctacagcatccagcgcacaggattccgaagcaaaagcccagccggagccatccggcagctggccaatgcagagagggcggaagccattaggatcgcgcgcggcgatcagtttggtgtgggtcataatgaccaggctgtaagcacccacgatctgctccatcgtgcggcagacagctgtttcaatatccgggctgatcaggcggttctgggtcagcagatagccgatgacctcggtgtccgaagtgccgtggaagatcgaaccgttcatttccagcttgtggcgcagctggggggcattggtcaggttgccgttgtggcagatggccatagtgcccttgcagtggtgcagaaccatgggctgggcgttggcgcgggtgcgctggccgctggtggcatagcgcacatggccggtggccatcttggcatcctgcggcaggtcagccagcacgcgcggggtaaatacctcgctgaccaggccaagatcgcggtagccggtcagcacaccgtccacgttcagggcaatgccgcagctttcctggccgcggtgctgcagggcatacaacgcgctgtacacggcgctgaccatgttggttttgccggtggaatcatagataccgaacacgccgcattcttcatgcagtgcttcggcgggacaaagctccttcattcagttctccgtttcctgtttcaaacgatggcagggtgcaccggaagagcgaacggcggttccagtacaccctgaacattggctggactaagcttggttcaatcagcccagcaggcgcttcataacttcctggtaggcatcggcctcaccgccaaggctgcggcggaacaggtctttatccaggtgggcaccggtggtggcatcccagaagcggcaggtatccgggctgatctcgtcagccagaatgatggtgccgtcagacaggcggccaaactccagtttgaagtcaatcaggcggatgttggcatccagcatgatcttcttcagcacttcgttgaccttgaaggcgtacttggcaatggtgtccagctcttcctgagtggcaaggtcaagggccaaggcgtaataatggttgatgaacgggtcatgcaggtcgtcgttcttgtagctgtactccaggatgggggtcttgaacaccttgccctcgggcacgcccatgcgcaggctgaagtggccggcggcaacattgcggatgatgacttccagaggaacgatctgaaccttcttgaccagggtatcgcggtcgttcagctcctcaacataatgggtggggatgccttctttttccagcttctgcatcagagcgttggacagcttgttgttgacaatgcccttatcgcggatggtgcccttcttttcgccgtcgccggcggtggcatcgtccttgtaatgaaccataacgatttcggggtcagaagttgcgaatacctgcttagctttgccttcgtacatctgttctttaatttcaacgttcattgtaatgcgctcctttatattctttcatgaattgatttatggaatcctttttataaaaagggataaaacaacagcaaataaaccgggatttgaagttacatagctgcggcttcggcagcgatggcggcgtcctttttggcaatggcggcggcggtgtcggcacggaactgatccagctcagcggcaagctcatcatcggcaacagccaggatggcaacggccaggtaagcggcgttcttggcaccgttcagggcaaccgtggcaaccgggaagccggaaggcatctgcacggtagcaagcagagcatccagaccgtccatggcaccgcccttcatcgggatgccgaccaccggcaaagtggtgttggcggcaaaggcacctgccaggtgggccgccataccggcagcgcacaggataacaccgtaaccattggcgcgggcagatttggcaaaggcagcggcggcttccggcgtacggtgggcggaaagaatgtgcgcctcaaacggtacatcgaaatctttcagcaccccacaggcactttttacaaccggccagtcactgtcagaacccatgatgatggcaacctttttacggttcggcatgttacagatcctccttcaaaaaataagagcgcggtgtacacgggtacactgcgcttatacaaggctattatgcttataatacaccgcatgaagaacacagctgcgcaaaccgaccgggaatggtccgaaaagattcgtgtaatgcacaaagtcgccctccatcctttaatgtatggctggatcccccggcgggctgtgtacagaataacacacaaaacacccgtacggaaaatctctgtaattaaagtgtaaagcgtgcagcgcaaaaaagcaagagccaaaactttttttggcgcacttcctattgtgtttaaaataagatagggctttttgtcaaagttgatggagaaaaacggggtgaagtatgacttttttgataaggatttttgtgctataataaccataccagaaaatactgccatgaggcaggatgggaaaggggtatcgcaatgaaattgttccacacagcccttgtgcttggcaaggggggctttggcacacagctgggagaaatgctggcggaagccggcggctattcccgtattttgtacctggatgaccaggcaccggacgctgcgggcaaactggcagattacctggatcccaccatcagggaacgctgcaccgcggcttttgtgggccttggcaacaatgagctgcggctgcaatggctgcaaaagctggtggctgcgggctaccagacaccggtgtttgaacacccggcggcagaagtatgcagcagcgcagccctgggggcagggaccgtggtgctgccatttgcctttgtgggcgcaggaaccaaagtgggggcagggtgcatcatcaatgccggtgccattgtggaccataacgccgtgctggaagacggtgtgcatgccgccccccgtgcaaccatcaaagccggggcaaccgtggagcgctgcatgaaagtggacagcggcgaaattatccgcagcccatgggaaaaataatgcagttgcgcggaaccggcagccaaacaatgcaggcagaattttgaaaaaagcggctccgcaatttgggtatattgcggcattgcccttaataataaacgaacgtaaaaaccagccgcctgccgtgcaaatgcacaaagcaggcggctggttttataagtcgtaagcaaaaggcgaaaatcaagcagggaacaacctgccaaaagaagcaaagcgcttacccgacgttttcaacattctcctcaccatccaccggcagggtggtgcgcggggtcacgctgagggggtcgggcagggtgttgttttcaacatcctgcaacacctgcggcacaccggggaagaacttggcgatgccgcagcccttgcagtgcaggccatcgaaaaagtcggtctcatccaaccccttaatgcaggtggggtcataactgccgtacagcggaatattgtagtcatgcgcatactggcggatccagttttcggtttcaaaaaagccctggtgctggtcggtttccgtcaacagaaagtcatacaggtacgggtgccagggggagagggtcaaaatcaccgtggtgccctggtttcgcgcatactggataaacttgtcaaacgcttcttcctgcttgggggaaagcgagtcgaacccttccatatgtacgctgttgaacgtggggcaggcttcggcggcaagggcgcgcacctggtcggtgttggcatcccggaatgcggggtcatacagcacactgccgtcagagcgcttgatggtggtgggctgctcgtaagggtcgccgtccaccgggttaaagtcaatggggttgccattgtcatccgtcacaacgctctggccgcggttctttaagtaatagtctacattgccctgaaaataagccggttccaccagcgctttccacagcgccacgcggtcctcttcctcatagtcggtttcaacaccgagaaccttagtcaaaaattcgttgtacagctccacatcggcgcgcttgtcaaaggcggcttcgtccccatacagcacccagggatccacgctccaaatcagcaccttgggcactttgccgtaacagaccatcttataatagctggtcatgttatcgcgcacatccgcgccggtaacgcccatgttgaaaaaactgtcggttccgacaagttcccgtgtgaactgtaatacgcggctggagccaatgccgatcacttccggggtgtccggaacatcctgtgcaaacagctggacaacctcgcgctcaatttcgttcatctgctcaaagttgctcacatcatagccctgcagcatcaagtccacaatgcggcggggggcaagctcaccctggaacaggccgctgcggtctaccgtatagctgaaccagaccatgaaaaccagaatgggaatgaacagggcaaacttgaacaacgttttgctgccaaagtataaccggcggaccaaaccatgcaaaaagcgaacgaagatatttggctttttggagcgtctgcgcggtgagggagcggattttttttgctttgtggtgggcttgcgggccggggcggcaacagcactgcggctgaccttttgggtgccgcgcggggcggaagcaggggtctgtgttggcataattgttctccctcccccgttaaaattgctggtaaatgaacgccgactgcccgaacgcggcaaagaacaagatggataccgcagcggcataatagaccgtccaacgcagcacaaagcactgcttgcggatccagcgggcaacattgttgccgttgtgctccatggccagcacaatggcggtaccgcaggtcaacaccaccggcaggcggccgtcaatgccgctgctggtgaccagattggtaacgctttcccatccagccgcaaagccgccctgccagccctgcagtattccggcgaatacctcgccaggggcagcgttgtaaatggcagaagcaaaaaataccattgtaaaactgaacagcaggtaggtgatgcagcgctggaggaatgtctgcacggcaggctcgcggtacagcgggttatagcgccacagcactttgcgtggcgctttgctcagctgggcaatgactgaaatcacgccgcaggcaatgccccattccagatagcgcaggtcagccccgtgccataggccgctgacggcaaacacgatcagcgtgttcagcatatggcgcaccacattgcagcggctgccgccaagaggaatgtagatataatcccgcagccagccagtcaggctcatgtgccagcgctgccacaacccggcaaagctggtagcctcgaacgggctgtgaaagttttccagcaggtcatacccaaaaatgcgggcagcaccgatggcgatatcgcaacagccggaaaaatccaggtagagccgcaggctgaacagcagggtagcggccaccaggttggggccattcatctcagcgggggtatcgtacaccatcttgatgtacaggttcatgttgtccgccaggaccatctttttggtgtagccccacagcatgcggaacgcaccgcccgcacaccgggtgtagctgaaccggcgggatttgtggatctgtggccgaaaatgggggtaccgctcaatggggccggtggtcatggtgggaaaaaagctaacgaacagcgcataatgcagcgggttcagctcaaccttgcagcggcgcttgtatacatcaatggtgtagctgagcgcagcaagggtaaagtagcccaggcccagcggggtaaccatatccgtgcggggctgcaataccgtgccgctcaggatatctgccgccaacaggttccagtatttgtaatagaacaaaagccccacacaggtgaacaccgccaaaagcaggaaaatcacccgcacgggacctatccggcatttgccgatcaccagcccgcagccccatgtgaccagtgttgccgcaaccaaaaccggtaccagcaggcggtcgttggccccccaacagtaaaacaggtagctggcagccagcagacagtaagggcgcagaacacggggcagggtatagttcaaaagcgccactgccgcaaaaaagccaagaaatagcagtgttgtcagttccatcctcaaactcctttggcgggattatttgccgctgagttttttctccaaatcccgcacgcgcttttccaggatagcgttttcctgggtaaggcgcttgcacttatccgcaagctggctgacgccgatgcttaaactgagcagcaccagcagcacaaagcagaacatgagcataaataccaggttgaccggcatttgtacatccagcagatcacgcaggacgtaaacaacataggggaataccgcaaagatgacaagaaccacggccagtgccagccagagaaggctgtattttacgctcatttggccctttttcagcagcgcaaaaataatcagcagcaggatggccgcacccaaaatcataaaaaactggaaatgtgccgtcatgggcgttgtgcctccttatttgcttttcggctggtggattttcttaatagaaaggcggtcaatgatcaaagacagggaaaccttgatcatgtaatatgcgcttttaaaactgcgaatgctggaaacgccgccctgacgttctttcatgacgaccggggcttcgcctacgcggaacccggccagcgtggcagccagaatggcttccggctccggataatccgaagcataatgctccgcaaaataggcggttagctggggaccggtggcacggaaaccactggtgacatccagaatgcgctgaccacagagaatatggatgagccagcttaaaaagcggatgccgacccggcgcataaagcttgtctggaagccttcgcacttgataaagcggctgccgatgcacatatccagcttgccgtccaataccggctgaacgacctgcatcagataagcggggtcgtgctggccgtccccgtccatctgcacagcaacatcataaccattggtgcgggcataacgataaccgcactgcacgccgccgccaatgccaaggttgaccggcagatccaaaaacgggtagccatgctccgccagcaattcagccgagcggtcggtggaacaatcgttgatgatcaaaaagtcaacctgcgggcaggtggcacgcaggcgttccacggtgctgacgatgttggcttcctcattataacagggaatgataacaagaattttggctgggtgattcaaaagggcacctcacatcaggggaacggccggtttggcatcaaacgcggccttccaaaataaaatgttccagtttgcgcagcagctcgctgcggcggtaatgcgcaagataatattctttggcgctctggcccatggcggcgtgctgggcggcgtccatgcgggtcagtgccagcaggttgtctgccagggcggcggcatcacaggcaggggagcttaacccgcctgccgcggcaaccgccgcattgccggcgccgtccatactggccaagaccggcttgccggcggccatataactggcaaccttggccggtacggtcagccccaagtccggcgaatccgacaggcagacgatcaaagcatcggccagcgcggtgaacttggggatatccgttgccggaacactgccgtaaaacgtaacggcgtcctcggcgtgcagatctttcactttggcttccagcgcggcgcggctcatgccatcgcccaccagcaacaggtgcaacatatccgccccgcggctgcgcgcatcctgcaccgccgtgatgacggtctccaggctttgggcgggggtaaaagtgccggtaaacaccaggttgaaccgcccgccgaactgcgcctgcaaagcggcatccggctgaggaacggcgtaaaaatcctcgcagtactgcgggatcacagcaattttttgcggcggcataccggtgcgctggcacagccgctgctgcagcggctcactcatggcaatcagtcggtcggccttcttatataaagcgtcgcttacaccctgggcaatcgcgcgcagggctttgttcttcacattcagcacgctgtacaggttttcgggccagatatccagcacatagttggtaaagggaatgtggtgctttttggcatagcggatggcgggccagcacatcagtaccgggctggtgttaaagcagaacaccgcatcgtacccgcccggcaggcggtgcagcgcatgggcggcgtaccacggccagctgatatagttcaaaaaaatgttgaccgaggtgttgcccctgcgcggaacctctttgcagcggtacaggcgggcaccgtgccattcttcttcaaaagggccggcggcgctgtaaccggggaaccattcgccttttgggtaattgggcagcccgcaaagcacatccaccgcaatgccatcctgcaaaaaaccttccacaatatcattgatgcggaaattttccggccagaaatgctgcgtaacaacaagaatctttttttgagagggcaaagggcacacacctttcgaaagttaggagttaggaaataggagttaggagttgaagaacggctgctagacttgaggtcttttgcaatctataaaatgctctgtagggaacgatcttgaccgttccaaagcattcagcttgtcgcagcctcaaaaaactcctacctcctaactaaaaaactcagttttttctccacaccatcttattaaccaccccggtgtagctctggatgatcttgacgaccttggtggaaacgtcttccgtgtagtaggggacggggatgccgttgtcgccgttggcgttcatggcaacggcggtggcaaccgcctgttccacgccgccctcgctgatgccggccagcacaaagcagcctttgtccagtgcttcaggtcgctcggtggaggtacggatgcagacagccgggaacggatgtcccacgctggtaaagaagctggattcctccggcagggtgccggaatcgctgaccacggcaaacgcgttcatctgcagatggttgtaatcatggaagcccaggggctcatgcagctttacgcgctcgtccagctggaagcccatggcgtccagccgctttttgctgcgcggatggcaggaatacagaatgggcatatcataggtctgggccaggtgattgatggaggtgaacaggtcgataaagttcttttcggtatcaatgttctcctcgcggtgggcggaaagcagcatgtatttgtgcggctccagccccaggcgctccagcacatcgctggcttcgatcttggccaggttggcgtgcagcacttccgccatgggggaaccggtcacaaaggtgcgctccttggcggtgccttcggcattcaggtaacggcgggcatgctcggaatagcacatgttcacatcggaaatgtggtccacaatgcggcggttggtttcctcaggcaggcactcgtcaaagcagcggttgccggcttccatgtggaagatgggaatgtgcagccgcttggccgcaatggcggaaaggcagctgttggtatcgcccagaatcagcagggcatcgggcttctgttccaccatcagggagaaggacttggcaataatgttgccgatggtttcacccaggtccttgccgacggcatccagatagaaatccggcgcacgtaggcccaggtcctcaaagaatacctgattcaggttataatcatagttctggccggtgtggactagaatctggtcaaaatacacatcacactttttaatcacagccgacagccgaatgatctccggccgcgtgccgataatggtcataagtttgagcttgttcattgtaaaacaccctatacagttaggaggtaggagtgaggagttagggcaacaccgcacaattcccgcctagcggcttaagcaccgcttcggcggctgcggcacggcatctgcgttgccaaaatgctcgataagacatccagtattatctgcgcttttggcttagcatctgccgcacctcgctcgccgtatcggcacttagaattatgcggtattgccttaggagttgaagaacgactgctggttttattgtcttccgcaaacgataaagagtttcgcagggaacggctttgaatgttctgagacatttaccttgcccaggtttcaaaactcctaactcctacctgagtatatacgtttaaaatgttacactttcaaaaagaacgtgtccggcttggtggggtcaaacggttcgttggcccacatcagggtcacaaggttttcagtatcgcttaagttgatgatgttgtgggtgcagccgggcagcatctgcacggcggtgggcttatcgccccacacctcaaactccatcacttcgtcacagccaactttgcgctcctggatcagcccgtggccggaaaccacaataaaaaattcccacttggtgttgtgccagtgctggcccttggtaatgccgggcttggaaatgttcacgctgaactggccgcagttttcggttttcagcagctcggtaaagctgccgcgctcgtctgcgttgacttttaagggaaaggcaatccgctctttgggcaggtaggaaagataggtggaatacagctttttggcaaagctgcccgccgggatctccggcaccaccagcgtggcgggctgggcgtggaactgttccaacagatccacaatctccccaagggtcactttgtgggtgacgggagcaaagcagtaacggccatccacggcaggcaccggggtaaggccgtcataattgcagcggtggggcgcagcttccagcgcattcagcatctcttctaccagatcgtcaatgtacagcagttccagctcagttgcgcggtcattgacggtgatgggcaggccgttggcaatgttgtggcagaaagtagccacggcgctgttgtagttggggcggcaccatttgccaaacaggttgggaaagcggtaaaccagcaccggggcgccggtggttttgctgtattcaaagaacagttcttctccggccagcttgcttttgccgtaatcgcttttgccatagcggccgatcagcgtggcctgaatggagctggacagcatcaccgggcaggtgttgccgtgggctttcagcgtatccagcagggtggaggcaaagccgaaattgcccgccatgaactcactttccactttggggcggttgaccccggccaggttgaatacaaagtctgccttggcgcagtattcatccagcagcgccggagccgtgtccaggtcatactcaaaaatatcagtaatgttcagggccgggcgggtgcggtttttgccatcgcggatatttttcaggttttcacacagattgcgcccgacaaacccctttgccccggtgacaagaatgttcatgccttgcctgcctctttcagtgcttcctggatgtactcggtggtcatgatctttttgatggtgccctccacatccaggcggcgggtgttgtggctggtataatcttcatcggcctgggtgtgaacctggcccttgatgaagtacttgtcatagttcaagtcgcggttgtcggcggcaacgcggtaatagttgcccatatcctcgctgcgcatccgctcttccttggtcatcagggtctcgtacagcttttcgccgtggcgggtgccgatcacgcgggtgccggtgtcgccaaacagctgctgcacggctttggccagatcgccaatggtggaagcatcggatttctggatgaacagatcgcccggattggcgtgctcaaaggcaaacatgacaaggtcaacggcctcatccaggttcatcaaaaagcgggtcatgttgggatcggtgatggtaatggggttgccggccttgatctgctccacaaacagcggaatcacgctgccgcggctgcacatcacgttgccgtaacgggtgcagcagatgaccgggccgccgcgctgtgcgctgacacgcgcgttggcagtgataacatgctccatcatggccttggagatgcccatggcattgatggggtaagcagctttatcggtagaaaggcagaccacgcgctccacgcctgcttcaatggcggcatgcagcatgttgtcggtgccttcaatgttggtgcgcacggcctccatggggaaaaactcgcaggaaggaacctgcttgagcgcagcggcatggaagataaagttgacgccgggcatcacatcgcgcaggctctggatgttgcgcacatcgccgatgtagaacttgactttattgtaatagtcaggatagttggcctgcagctcatgacgcatgtcgtcctgctttttctcgtcacggctgaaaatgcggatctcgccgatatcagtcgtcaaaaaatgcttgagcacggtgtggccaaagctgccggtgccgccggtgatcaacaaggttttatctttgaaaatggtatttgccatggtttcctcctgtcaggggacgaacttttggtggtaggcgcagcagcgtcgggcatcttccaatgcccataaagccaacacttcccctatatacaaccaattctaacataaaagttacagattgaaaagggcctgaccttggaaaatgctgttttttgtggtacaatacccccagtgcaaccattatacaataaaggagaatcagattttatgcgcgcttatgaacgtttgctgaattacgttaaggtgtataccacctcggaccccgtaagcgatacccaccccaccaccgcccgccagtttgacctggcccgcatgctggtcaaggagctgcaggaccttggccttgcggatgcccatgtggatgagcactgctatgtttacgccacgctgcccgccacccccggccacgaagctgccaagggccttggatttattgcccatatggatacttcccccgatgcaccgggcgagaatgtgaagccccagatccatgaaaattatgacggcggcgatgttgtcctgcccggtaccggcgcagttctcagcaccaggcagttcccattcctggcaaagctcaagggccaaaccctaatcaccaccgatggcaccaccctgctgggtgcggacgacaaagccggtgtggccgagattatgaccatgctggagatcctgcagaaagaaaaccgcccccacggcaagatctgcgtgggctttacccccgatgaggaggttggccagggtgctgacctctttgatgtggagcattttggcgcagcctatgcctacacggtggacggcgacgaagcgggcgaaatcagctatgaaaactttaacgctgccgctgcttttgtcacggtacacggcttctcggtccatccgggcagcgcaaagaacgccatgaagaatgcgcagaacattgccattgagttccacaacgccctgccgtattacgaccgccccgaatacactgagaaccgcgagggtttctaccacctgtgcagcatggaaggcgatgtgaccggcgccaagctgggctacattgtgcgtgaccacagtgccgaaagctttgccgcccgcaaggagaccatgcgccacattgccaagctgctgaacgaaaagtatggcgaaggcaccgtggagctggagctgaaggacagctatttcagcatgctggaaaagatcaagccgcatttccatctggtggaaaatgcccgcgccgccatccgcaaggctggcctggagccgctggaaacgcccattcgcggcggcacggacggcgcgaccctgtcttacatgggcctgccctgcccgaaccttggcaccggcggctttaactaccatggcccgtgcgaaggcatcacggtagagtctatggataaggcaaccgagattctgctgaacctggccgatatttataaggatgtccagtaaccagcgcggcctttttgaaaaaaggcctggcgaaaaactttaattggcttcgcataaaaaagagtaatagtcgtgtggtgcccacggcggtgcaccgacattattatttattatttcattcctgatagaaaaatagcgcccgacggtttaagcgtacctgtcgggcgctgtttgtttatttgcttatttatccggttcacagtccagaatggagggaatattggcccatttatccggttcggcttcgtaccgttcgtgcagccaggcaacggcggcatcgagcccctcctgattgccggggaactctgccatctcctgcttttcatcggcggtgtgttccaagctccatgggccgggccagatggtggcggtcagatattcgatcttccgcttgccgctttcatcggcggggtcagcttttttggcgggggctaccagatagcgcatgccgccctgtgcgccggagtacgggttgccgcagtggaaccaatggtagatgggcaggcagtccagcataaaatctcctcactttcaggttttgctgcggttcagttccgcgcgtagttggatcaggcgggcaatatcttccttatcggcctgggtcagttggtctttcaggttctggtaggcggcaatgggttcgtcctgaatcaaagcgtccagttccgccccggcaggggagccctgccacccgaccaggtagccgggcgccacgccaaggcaggcggcaatgctttccagcttatccagcggaatattggttacaatgccggtttcgtatttataaaccgcttgtttggtcacatgcacctgttcggccagctgctcctgtgtcagccctttggcggtgcgtgcttcgcggatgcgttccccaatggtcatgcggatcacctcccaaaaagtatagcaaaaaacctgcgggtttacaagatgataaaaataacttgacaagttacagcaaggatgctatcctgtgagtaacctgataagtttcaagaaggaatgttctctttcggctgcaaaacaggcaaagacagagaaaacaacagcaaagcggcggcagcagggccgctttcatttgaagcacaagtaacttatcaggtttcaaatggatcataaggaggaatggaatgacccacgaaattgaactggaaggatattaccctaaaatttttggcagccccatgcgtatgctgtgccttggcaccaaagccagctatggcatggaggttctgcatttccggcgcggcaccgggtgggatggccttgcgctggatgtcacgtttaccctggacccccaggcggaggggacaacggtgctggcggatgcaggggacaccgtagcggtgccgcccgccgccacagcgcaggcaaccaacagcggcagcgttacggtgcgcggcgtgcgggatggcgtgcagtgcatcagctgcaacatcccatacctggtgctgaaccacgccccggtgcccggccagcagaccgacccggcggaaagtgtgtggaaacagtatgccgataagctgatccccgcgggcggcagtaccgggcaggtgctggccaaggcatccgcgcaggatatggacctttactgggccgacggcaccaccacccaaaccgaaaccacaccccacatgctgaccaacgcgggccgcagcaaaaagaaagccattgtatcgtttgtggatgacgactgccgcagcgaagcgtacaccgtgctgttcccactggtgcaggaacttggtatgccttataccgtggcttgcccggcggggcttatgggcaaaaccggccgcatgacggtggaacagctgcaggaaatggcgcgcagcggcgtgacggtggcatgccatacgatgaccgaaaccgatatggagcaggatacccccgaaacgctggaagccaccctgcagcagtttgaagcagagatgcgccgctggggcatccgcggggtgcgcagctatgcctatgtgaacgggcgctataaggcggactgcctgaacaccgtaaaaaagcattttgacctgggccttacggtggaaaaaggcgtcaaccagatcccgtatgaaagctgccgcatgaagcgcgtggaagtgttcccaaagaacaaaagctacacgctggaggatgtaaaagcgtgggtagacaaaaccgtgcaggatggcggctggctgattttgatgacccacgcatggtacacgacctttgatgcagcacagctcaaagagctggtgggttatatccgggccagcggtgcggagctgatggacctgtacgatgcactggatgccaccggcaacgtggtggaagcgggcgactaccaaaagccgggcgcggatgcagcggaaccgttttttgtggtggatgcggatggccgcgcctggaccaacgcgctggagaacttacgcccggcagatggcatcaccaatgtgggggcagccctgcaaagtggatatgtgatctccaccgccaccggcaaggcaatcaaaacatcagataccgggttccgggtcacccagccggtggatgtgacaagcgcggcccaggtgttggtaacggcctgggcgtatacgggttttgcgctctattctttctttgatgcggcgggtacctgccttgccgtaaaagcggccgatgccgattatgctgcgggcggcaataccctgacccggcaggcagtggccgtgccgcagggggcagccactttgatcgtggcgggcaatttgtaccaggcgctgcccgccgtcaggctggtcagcgcggcaaacctggtgcagcaggtaaaaagcatgacggttgcctggcacgccaactatgtgctcaaaatttccggctcgaccgtcaactatgcaagcgagaatcggcgcatcagcgaaaaagttgccgctgcggcaggggatacctaccgcctgagctgttcggccaactggaacaacgcgctgtatgtgatctatgcggcagacaacagcgtgctggcctgccgccaggcccccaacaatgccgccggtgaggtactgaccgactttgcggtgacaatgccggaaaacactgcctatttccgcgtggcagcaaacctggaaatccagccggaatcctacgcggtggcccgatacaccacccgcattgcggccaaagccccggtgcttacggttgcagcggtgcgcaccctgctggatattttgcgggcggggacctatacccaaagccagcaaagcgccatccagaatctggaaaatgcactgctgatcatagactgacaatacagcgcggtttttcaacaaaaaatccaaaggctgttgaataaaaagaaaaagcgcagaaccacttttggttctgcgcttttttggagcgggatacgagtctcgaactcgccacctactgcttgggaagcagtcactctaccggatgagctaatcccgcatcggtagcttttattatacttcccaagttccagtttgtcaagccccggtcgaaggtatcagccgtcaacggattcaatcgcgccaacggggcaggtctgcatggcatcggtggcggcggcttcatcggggccggttacatcggcaggggcagcggctgcggtgccgccgtccgtcatggtaaaaacttcggggcaggtgctcacgcacaaaccgcagccgatgcagtcggcgtttacatggaacttcatgggcagtcatcctttcacgatgtgttatcaacagtatgcccaatcagcggcaatcaatccatgctttctgcgttttctgcggcggcttccccggcggcataggttccgttggtgtgacctgcaaaggggtaggtacgggtttcggtggcggtaatgctggttacgccgaaccagcgggcgcggcccaaagcgagggaatcctcaccgttttcgcggatatccggcaggccgtatgcgccgcaccatttggtgtagggttcgataccatagctaataatgttagccgcggcgggctcatccagctcgctaatctcctgccgcagcgtctgggtgcgcacatggtccatcatccagtagctggcaatgtcatacccggcttccagcatgtggatgccgcagacgatccccacgcaggcgctcaggcaggcaaggccccgacggaacactttgctgttcagctgtaccaggcaggcggcgcaggcggcagccagcagagcaaacacaccgtgggtggagcggggatagtagtcatggctgccgatcatggcaaagtttgcccccagcgccccggccagcagaatcagcggccacagcaggtcagcttttacagcatcctgccgggcaaagcagagcagcaaaaacaaaatcgcaaaggaaaacagcaggggcagggcatagtctttgagcatattcaggcaggcaaaaaagcgcatggcgtaccgggtcagcagactgtcgtaatcgctgaagccgctggcacggttaaagttgccgcgcgcggtgatgagcaaagcaaacccaaccagcgcccccgccaggccggtcgccatccaggcgggcagcctgcgctcccgcttgaacaca

SEQ ID NO: 1143 - DNA, 25679 bp, unidentified
  source 1..25679: mol_type = unassigned DNA
gtatcatcaaaaaccacccaatcttccttatttgcccttttcacttttttgtccttataggaatttttgaatgtcctgaagttgacagtctttccgatatactccggtcgggcaatcagagtagtaacctgatttcctcgccacatatacggattttctttgtcatagttgcttgcatgatttccaagtccctttttcccaagataataagagggtctttcaattttttcttctgaaagttctcttgctatctgataaggtccttttccctcaatagtcatacgataaattctgcggactacttcagcagcttcttcatcaataatccaatggtcggggttttcggggtctttcaaatagccgtatggtgggatattacttgtataccgcaccttccaatctcgcagcacacgggcgtaatccgacagaacagaaaagcacagccgctcgttttccatgagctgctgtgcttctgttcggatgcgctttgcgtggagtgctgctgcgctgggcggcttgtccgggctgagatgaaaatctgccatcagcttccgcgccgcatcatagggcgaaagctgaaacagcttgcccacaaagtcgatcacatccccgtgctccccgcaggcgaagcaatagtaatgatcgtctgccacatacaaactgggatgtcggtcgttgtgaaacgggcagagggccatgccgtagcggttgacttccacgccgtacagctccgctgcctcccggcagcttacgccgtatttgacaatttcaaaaagattcattgttcctccatttctgcgcaaaaaacggcggcctgcccattgaggggcaagccgccggttgcgtcttatcttatgctgatttcgtttctttttcgttcttagcttctcgtagagctttcttccgtgtgccctgccgcttgatctgtgctgcataccgacaatcgtcactgcaatatttcacgtctgaccttgttgtggtaaacaccttaccgcagttttcgcaggcacacgcccgactgcggatctctgccgcctcctgccggtagaattttgcacggcagttggggccgcagaacagggtgttcgtccgcttggatgcaaattcctgcccgcagcacttgcaggtcagcgtaaccggaacgcccactgtgcgttccccagatttcaacttctggtagcgctcccggctgcgaatgcgctcttccttcaaaaactcctgccgcttgatttcttcctcggtcagctccggtgcgggtaactcaaactgcccgataaagcgaaggtgaatttccacctcctgcacccggtcgccatcgatgcgctccggggcgtggacgatgattttctcaataaactcgttgatcatgggcgtggtcagctcggagaagtccgtgtacttccttgccatctccagaaactgctccacacgggcggtgtcctctgcgaaagcggacagcctttcttccgcttctgtgacagaggcttgcagcgttttttgctcggcttcgtaatctgccagcagactgtcaaagcgttcatcggtgatgcgcccgacggcaaaggattcatagagctttttgatgatagtatccagctcggcaatgcgctttttgtccttactcagctttcgtctggcgtccttggccgcttctgcctgccggagctgggaagcagagcgcaccttttccatgaacgctgcctgattggaaattgcgaaggtgctgaccgtgcggatggtgtccagaatcagggtacgcagggccttggtcgtgatataatggccgcagcaggcggcagttcttttctggcgggcgagggtataggaggaacaatcgaagaaatcagagggatagggattattctccgtgccgcctttggagcggtggttatacatcttctcgccgcagtcggcgcagtacaaaaggccggtcagcggattcgcttcccccagcgtgtcgatgcgcttgggcgtcttgcggagcttctgggcaagctcccatgtttctctgtccacaatggcctcgtgggtatcttcaaagatcagccaatcctccttgggattcattacggcgtttttatctttataggactgcttgtgggagcgaaaattcaccgtatgccccatatactccggcttggagagaatctgccccacgacatagccgctccagttatagggatttgaaaattcctccttgcttttccagatgcccttgccctgcttgccgaagtacacggcgggcgtctccaccttatcctcaaagagaatacgggcaatatcgtagggtcctttgccctcgatggtcaatcggaaaatgcggcgcaccacggcggcggcttcctcgtcgatcagccaatggtatttgttttccgggtctttcctgtagccatagatagcacagttggtggtaggcttgccggattctcccttgacccggatggcggttttctgcttgcggctcaggtcgcgcagataccattcgttcatgatgttgaggaagggggcaaactcgttgctgttctggtcatcgctgtccacgctgttggcgatggccacaaagtgaacgccgtgctgccggaagaatacctccgtgtaaaatccggtttgcagatagtcacgccccgcccggctcatatccttgacgatcacatgggcaaccttgcccgcctcaatatctgcgatgagctgcttccatcaacaaacgaacgatcatcggatgggagcgtgatggccgctaccctcgcagtgttgaaatgctcgaaaagatggctgatatattccatgtacctttgacctatttacagccggatcagtctttatttatcgaacgtgccgccgaagcctacggaaaaaagggcaaaatagaagcccagcatctcgcatttgagcttactgagctatttgccagcggagagttgaccccgcaggatatggacggcatcatgtatgaaatgcacaaagcctattttaagtaccgagaacaaaaacgagaaaaggaacgaataatgaacctgtaaaccactgttccattcactatgccatccccggaaggagatcacattatggattctgcgtttattcaccaagccgccaacgaacttgtccaaaatgccggaactcgcaacatcaaacagatcgcgcgcagttgcagcctggacatcagtgaaacatcccgcattaaagatatgttgggtttactttcgctctattttgataagccattgattcttatcaatcgccagctggacaaacagacgaagcagatggtgtgcggctatgcgctggggcattatctggagcatcagctgctcatggacttgcataccctggacaagtttctgaccattaaggacaagcacatccttctttacgagcataacgctttcacatcccacctgatgctggacagtgatgaagtctatcaaatgacaaagcgtgggttggacgcggcgcaaatttccgtagcgaaacgaattcatctcaacctagtgatggtgaaacttcttgagctgcatcatctgggatatgatctaaggcactatcacgcccagcaccatgcgtttatcaaacagttcaaccttccggcacattttcagtttgatgtggccgctggataaacttatgttcttataaccctaaaacccgtgatgaacagtgcgttatgcctgtccatcacgggttttttcctgttatttcagttttgcgagaatttcatcggcactcatgccttcggcaagcagctttttcagaacggattccgcttctgcctttttcgcatcttctgcagctttggcatctgcctttgccttttttacttccagcatttccacttctttttcgactttcttcaaagcagccttcttcactttcagatcagccttcaaagtgtcaatgtttgcggtgatggatgcgatttccgctgtgagcgcttccttttcggacttcttttctgcaatctgcgatgcaaaatcggcagtcacagttttcggcttattcttgctaccttttgttctgggcataataaataacctccagaaaattatagtaattttagtatagcacctcttattcaaattctcaagaatcaattattattcggtgtcaattgaagctgaagattcaatcgaagttcactcaccggatcttccatttcgcaagtatagtcatttcttgtcacatcataaaccacggaacccacagcctcgcatttatcaaagttaaaaatcacgacattaacactgttttcatcgttataaagagaacttttgaatacaattccgtcatagccaattctctttacaaattctgcaatatactgtgtaggaatataatccagtgtatcatcatcttctgtcaccggctttgaataaagttgtgacaaagcatggaataagtttatctttaccgacttcattcctttcgggtaattttgcaaagaaaagtccagcaatcgtaacctttcattaacacgaatccgtgcaacacttacccttgcacctaatcgaggacgcacctcaacaacagataagtatggccttgttgcacagtagagatatggaatataacgataattagcacgcatatccttcgtgcattctgacggtgcaacaaaactcccatcttttccaaatccaaagaacggatattctccgtttaatttgtcttttgagtgaacaatcctactccgataaagatattgttgtgaatcgaaaagaagttcaggatttgtttccatttcctgcagcatctttaatacgttattatctaccggatttcgatttttatattgtatctctttaataaactctgacagctttcttgaaatctgttcactcgattgcttttttgagtatgtattgcctctcattctttatcttccagactttccatatatttttttgcatctttcataaaactcactgcaatcatcacgattaccgcaccaatcgggaatgccgcaacaatactcactgactgaagattgttcatggaactttctgcaaacagcaaagcaatcggaagcaaaataagcagaatacaccacatcaactgaatgcccttattcggctgttcaccatcctccagtgtgtgatagctatagcaggatgctgtcaatgcaatggaatcaaaagaagttgcatagaaagcaatcatcgtcaacagaacaactaccataataacaggtgcacccggcatcgttttgatgatagaaacaatcatgccatacagatctccgtgctccagatactgcgcaataaagtcagcctttccagtgacctgcattcccatagaatagttcccaagtacaataaaacttgtcaatgtagaaccaacaccaaatatgtaaccaccaagaattgtctgacgtactgttctaccgcgagaaatgctgccgataaagaacggcgcagccacacaccaaaccatccagtaagcccaatagtagatcgtccaattctgcgggaagttcgatgtacggagcgggtcagtgaacgtagacagatcaacaaagttctggatcattcgtccaagagaagaaaaaccggtttcaataatataccgtgtttctccaccaaacagcagaacaaacgcaatcaggccaaagaacatataaatacaaatgtttgccaacttgctgattcccttaaatccatgcagcaaggaatatgtatatacagcgcaggtaatcagaagaataataatgttgattacagtacgactaacggcaacatggaacagttcgctaataatggttgccataagaggtgtcgctacactaaatgttgtagcagtgccagcaaggagggcaaacacagctaacaggtcaataatgcgacctgcccagccgtcggtatactttccaagaatcggacggcaagcctctgaatacttctgacggtttctttttctcacatggagcataaagccaaaggcaacagccagcaccaaatagaatccccacggaataaaactccaatggaacagcggatatacacctgcccaatcctggatactacccatctctgccagatgcggatcagttgcatacagcacccactccgagaacgaatagaacaaaatatctgctgcaagaccacaggtgaacatcattgagccccacgcaaagaaggaatacttcggcttctcattctgctcaccaaggacgatgttaccatacttagaaccggcaatatacagagaaaagatgaaaatccccaatccaattaccaagtaatatgtaccaaaggtatcaccaaagaaaaaacgaatctggctcagtacagcattcgactgttccggcgcaaaaaagaatagaacacataatgcaatcacgattgccaaaggcaccagtgttatcatccagtctattttcccatgttcttttttcgtatccatttacttttcctccacatattttttgtagcttgcatccagagcaattagttcactcagattatccacctctataatatcgtccttattcataggacggatacccaattgatactcctccgggtaacagaacatcgccacatcatcccagtagatttgccgattcttcttttgttcaaactcaatttcgagatgtcgtttcagttttttcccatcctctgcagtccagcgggaaatactgtacagctgccatccgccttttccacctgtccggctacatgctgtaacaatgccattttcaacagtctgaagccactcatccgtttcatcatctgtccaaacactgttataaccagagcgttcaaattctggtgctaaaatttccggattataaatgatctgatctccatcaagaatgaaagcattctcaatatactctcgtgccacataaagtgaagagatgttgttgcaagtatcatagtatggattttcaatcagcttaaccccaggatactcctcttcaagtgtcacaaactgttctttcagatagccgacaacaacataaatttcattaattccgtttttatgcagaccatcaatgactgtgtcaatcatccgcaccccatttactttaaccagcggtttcggtgttgccagcgtcaccggatgcattcgatttcctaagcctgccgccataataatggctctttctacttttggcatttattcttcctccccttgctttttcaattcctcttgaacaattcgataatagtcttttgcatatcgatactgccgaagcgaatactcaccaaactctacgccgaggtttctcttatactcgcaccagttactccacaacagaccacaagcagcaatgtagcaataaatcttgatcctagtttcatcactgcagccttccgtaaaataggctgcaatcaggcgatcgacctgacgtttattataaagagaataaatacagaacatagccacatccacatgaggatcttgcattcctgcatactcccagtcaatcagtcggatttcttcttttccatctttttcaacaaataggaaattatctggcacagcatcaatatgtgtcaagactttttctccagcatgcgcatcaatataagacttcagcgacagaacatttgcttttgttttttcataatccttataaacagaaggcatcccctcccacagtgtttcatagaactccatttggccgaaaatatcaaactcgtgatttactttcaatttcaagtcatggaacgcatgcagtcgtttcatacacttcttaacatcttcgtagttcaatgggtcgcatactcttgcgccttccagaaattccgtgattttataaccgtttttcggattgatatacgcaatatcatcgcaaatatgctttccatcaatagcctgataaactgccgcttcctgacgacgattaataagctggtcagtcccctctcccggaatacgcatgatatatttctttcctttgcaggtaaacaggaaagaccgattcgtcatgccctttttcagaaccgtaatatctgtaatttcttctgcctttgcttttaaggcctcacaaatcacctgaattgcatctgttttaagttggttagagtcgctgtcaatttctcgtaattgctcataggtgttaatttccacaacatctgttgaatgaaccacacgagccgcaacaatcattcgatccttgttataaagtgattcttcccagaacgctccatcgtaccgctgatttttgcatagttcctcaatacgtttagcaactgtgtcggcatcctcttttaccaaatagcaaataccaatcattgcattgccgccagaactttctggcacagttaccagttccatcttacgattaacgcggacattgctttcgttatccactaggtcactaaccatataccaggaatacagttcatggcggtgaaacggatttctgtcacaccaaatatcacatggaataatgtacgcattttccaaatgttcttttacaagtttgactgaattcagattattctttgccgcataatctgcatttactaccagctctacgccatattcatcaatcaaatactcgtatttttctttcataaagcctacaactacatagatttctttaatccccacctcatgtagctgcttgataatacgttcaatcaacggctcaccattaacttccaaaaggccctttggcatctccgtattgattggaaccatgcgcataccaaaccctgctgccaagataatagctcgctgcggagttttctgcttgaactcagttatggctttcactgtagggcgaatcgaatcgtccaaataatcagttttaatgagttccttgagcgaacgatttaccactcccaatgagtggccggatacttctgctaaaattcgttgattgatgaaaggttccagcaaaagtgtgttcagaatgtcgctttcctgtttgttcatgtactctccttttttcgtttctgcgaacatcatcattcaaaaatagccaatccctcttatcagaaagattggctggtctttctgcacttcgttacaaattcaattactaggaaagctgtaaagatactctcccaactcattttcgatatattcaatttctgccagattgcattttactttcttccatgtatatgtgttattaatagagcgccttggatcaaagtactgttttttcttggtttgctctttcagttcaaaacctagccaattcgcaatttttttcgttgtttcatcatacttataaaccatatcttcaaactgaatgaagcaaacccttttgtcgtcaaacaattctgtttttctgtgtgctcgtgtatatttaaaccacttgcaaaaatcttctacgttgttgggtatcaccccatctttccatacatatttttcaagtacaaaaatatctcgcggatcacgatcaacaacaaaaactttaatatcattgaaatatcgaagatacctttttaagtttgttggtggaacaatctgatcaaccataaccgtatttgcacctcggcaaacagatccaaacaaatcctcaatatacatttttgtacagttcagaaatttttcttcgcttggatgcgcacaatatgtaatctcatttttcattgtatttaatgtacgttcaggctgatttctccaaacagtcattcttaaaatcttattcaaaattcgtttccgaaaatagaaaaactctcccttatccatcaaatcatattgccaccagccatgataggtaaaatcggtaaggtcatcaatatatttttcagaatattttttccaattcccatggaaaaatttctcatactttttaccaaacatattaccgcaataaaaatctactaactttttatatcttttaattgcgtgaccagagttatgccgattaaaattttccaccagattgtattccaaatctgagaccccatctggatcctgcacaaagcggaactcttcatctgtaaaagagtacaccgtgtcaaattctgagacaaagtctgtgatagcacttgatccacttccgtaataactcgcacatgatataaaacgcatcttaattctcttcaacctcttccaaaattgattttagtctttcttttattacatccggagaaaaatcctttattctttcgtcactttttaatacataatgattatacaaatcaggatcagatgcaattttttttaccttatttgccatgtcctctgggtctttcactctgcaaagcaagccatattcattttcccctaaaatttctcttgggccagtctttgagtcagtaaccaccattggtagacgataagacatcgcctcgatcattattgttggcagcccctcacctgcgacacttgcatggacaagcaaaaaggctgctttataataatcttgcacatcaaagcgacttccctcaaaatgaatatgttcctgagtatcttgtgaaagtgttatcacatacttttttacactttcctcatccggaccatctccaacaaaaacaagatccaaatcttcgtgatatttttttctaacaatatccaacatctttgctaccgtatattgatctttatgtggatactcaaatctggaaaccatcaaaacaaattttccatacttttgtttcaactcttcgacgtgcgcacaattgatttcacgatttttaataaatgtgggattatataatttgtggatgttaagttttaaatttttattataagacaaggcttcttcttgcgcatcatctactaaaacaatcagatttttaattttctcatataacctcatatagccataagaaatcaagaaataactatacaaagcaccatgtagccaacacatttttttcttcgatttaataaattctctcgaaacaaaatccaagtcattaaagtgacccgaaaaagcgatggttaaatcaaactcttcgctgtcatgatatatcattttaaattttctttttaaagtgtaggaaatcacaggcatcactagcatagccaccaaataacaagctgttccccaaaaacctttttttacaagctgcgcatactgctcagtaactattcgtcttggataattgaatccaatccatttacaatcttttggaaattctttttccatctctttaagattcggcaccagattaacaaccgtcacatcatgtcctaattcgcttaaaattctagcgtagtctgcccccacacgttcaattccacctatttgaagtccatcgaatactattgcaatcttcatggtgcttttctccttatatcgccgaatcacttttaaagggacacactcgcaagcatttttcacaatgaatacacttattttcatcaacctgcggatattcaaatccatcctcatcttctaccatagagatagcttttcgtggacaactcgcataacaagctgtacatccgcaacattcttcttttcttttaaatagtaccaacgtcttgcatctccctacaatcaaatataaaacacactaagtaatcattactatatatcactctctgtccccccccccattacttgaagtatacttttaatcaagtgctttatctttctttttgttcgtatcgtcaacgagtatttaactggggctgcatatttcttttctaattcatcgaaacttatagcacgcatatcatgaaagaatgtgtttctttgtgagggccttacacaagatttgtattcagctggattgaatcttaccccttcctcataggtcacttctttcagttttaaattctttttgattttctcaaacacttttgcgcctttatctgtgcggatcaatgccaacgatgttcccattccatctgacatttctggtgcaacttcttcaattccccaaaaatcagcaattgttaaatcagacttgttctcttttttggcaatacactcatagcatgatggccgcaagcaataatttcttagaaacatctgcatataagcgtctttatctttaggtatatacagtttcttttcttctctttctggaatctcctttagaacctctttcattccaaaatcactccagccattatccttacagcggaaattaatgcctttcagctttccagcatttctttcttcctgatactcaacatactttttccacaatgtcggcgaaggaacaccatgacaaattacatctacacaaatgagattatcataatcttttcccagaaaattctttaatccatttatctgacatcccgttcccgtaaacaatacggtttttccatcttgcagattctcctttactttcgcaaatgtgtttccaactttcgcttgaagatattttgagccacgcagtcttttcataccaaattcatctgttactgcaataaaattagctgaatagcaatcttcagacattgcgacaccataaacaatgccatctttattaagcacatagtctgctagagaagtaaatactgctccagaagagctactcaatctcgcttctttatctttgttataacaagcatatactttttctggtttcacccgtatatcctcctcttccagtaccttttatataaatccaatatagcgcaacaattttttatggctcttcaataccatttgaccaatatgaactataatataactaatggatgtagtcagcataaatcgcaatatccaataaatataccagttttcactttgtataattctaccaacaatcatcagcactgccatgtgaatatagaaaataccatatgagcaatctcctatctttgatagcaagcggcagatactacaattactttcatttttcttcagaagccagccaatcatggcaaaagaatacaggaatgaacctgctgttatctggctcgtatagaatccaatatcaagccctgttgctcgtaatccaatcgcttcaacacagcttaataagagtgtagccgcaaccacaaatccattgcctttcaatttccatccacaacgcacttgaattcctagataataaaatccaaaccatgccggaaataatgtttcgtacagacgtggcgatgcaccaactatataattccaagtgtacaaatacaccagataaaccggtgtcaccaaccataaaattctactgataattccattctgttttacaattttgattagccacggtgtaatcaccgtaagctgcaccaaaacaacaatatagtaaaatggagttgctgactttccaacaataaatcggtaaacaaatccaaaacaatgaatctcattgccactgtatacattccttaataactcaagcccgctatacagaagcgaccaaatcataaaagggatacacagtcgcccccccgataaattatccagtgtttgtaactgaactctttatcagataaggcatcaacattcacaaaataaccagccataaacacaaatgtggctaccgcaaaattgatgatctgacgaagtattatgaatgctgaattataaccagtagaataatcaaattcacctaaagagtgaattaacactactgccaatatgcatactcctcggatgctttgccaatattctctcttttctttcatctttttatttccttaaaatttttctaattggcccaatgacaagctgcttttcttcatcattcattccaaagaaatacatcgagaaagcatacacaaccgtataggccattgcaaacaatcccaatttaacaaagccagtaatattaacaaatttcatgatagcaatgccgatcaaacatggaacaattagtgccggaatgaaccttgcaatctctttccaaaaatataacatattcattccgatgcgagcgtgataataccagttcataaaaataatatttcctgctataagggaaatcgctgtacccaaggcagcaccaattggtcccataagcttaattaatgggatactaattgccacatttgcaattgcaataaaaaggtaaacaattgcccttgctttatgcatattttttgcgcgctgaatttcaatgccaagattctgtattaatggaacagttacaggcgcaattagtaaaagcgctactgcatatgagtctccgtactccgagccagcccaaattttcacaaatggaatgccaaaaaaaatgaaacctgacaatatcaaaccaagtatcataaattgaatacggccaacctttgtaaaaagtcttgtcaattcattatcatcaccagattccgcaacaatacgatttacttttgggacaaaaacattcgaaaccgatgaagaaagctcaatatacatcgaattaatttgtccaccaactccataaactgctactgctgttgtacctgcaaatctacctaataagaatttatctacactccaatttatctgatctataatttgatttataaaaataaaaaaagtgaacacccacatttctttaagtaaatccagctgaaatttcttaaagcagaatcttatatgaaggttatgaaaagaatagtatacattcattactaatactagtaatgtcaaaaatgttgtcactgccaccattcctatagatccatagcccataataagcaacggcaaggctaataatggattacatacattttgaagtaaaatcaaaaatttttgaaatagaaatttttcatgcgcagtaattgcacatgaaaaaacactattggggaatgttagtgccagattaacaacaagcagcgccattaaaatccttgcagtcgaatattcagaatccgtcaacccacttccaaaaatccccttaatattacccaacattacgcaaccacataaaacacagacaattgaaagtgaagtaaatattaacagaaacattccatttaatcgcgctactccatcttcatctctctgtgctttataacgagaataaaatctcatataagaactactgaatcccaagcttaacaagcttagataggatacaacagaatagacaagttgataaagtccatattcactttgaccaagaagccgaagcatgatgggagtataaattatgcttatcaagattttcgttagttgtccggcataagataatataactcctgcttttctttgatttatcttcatatgtttacaacccaattatttattatccattaatttcttactcaaatagccattcgaatccattcgcaaatattcaagtcgtcttttcacatcacaataatcaatttcattgataagcaaatcagtactactttgttctatattttgcacccatctatcttctattcccaaatttttcagcaaatctataatcctagagtccccagagttttcttcatgaaaatttctcctaaaagatagaaagcgtttctcgtgtataatagaaaaagctgtaccatgaaatgaatctgttaatacaaagcaagcattcgctattgcagaattgaagccatctggtccgtcatcctccaactctgtcgcgtgatattcatctgcagattgatagttacctaaagcatctttaatcgtcaaaattcgcaaatttaattgtttcgatactatttccgcaaatttccttaatttcttttctttccccaaaaaatagcaaaaaatatacggttcttctaattcgcgcgttttatgtgcctcatttatccaatatgtcgaatctattaataatgttggatcaattgtagtttttatttctttttgcggcaatatttctttcaaaatagtctggccggaatcctctcttacagctattccatcaaatgtcctcaatgacgtttgcaatagttctttttcattctgtgacaaatagctcagtccaatacttgctgcataagacagttttgttttccctgttacaaatcccaacaaaaaagcattattataataatacggattaaatacttgatcacttcctgttataaaaacatcataaagatcattacaatcgctaatagtttctttattataaattctttgtgaatgtgccgttttattttcatacttatgaaatttatttttccttgcacttattttatttgatattttcttgttattctgctttacattgataccgtgaactacatatcgaaactttgacaccattagataaattagcccctgctcttttatcttttcttttatactcttttcaaatggatacttttcgtctgttgcatcataacaaatttgttcacactcatatccatattccttaacaatttgaactaatgccctcgcctgtaattgagctccataattaaaggcattataatatatcgaaacaattcccaccctcataagcatctccatcaccatcactagtggctattattcatttactaatctttcacattcaagttcaaagaataaggcacggtaagccttaattttaagaagcacaacctgaatttttcttcgcagtggcagtgtctcatatttaaaatttataagccattttatatactcatagttttccgcacttaaaattaattctctaaaatgtgcatacgaccctgtgctttgtctcaatcttgatatgaaatcacccaaaaactttatatagaatttttcctcataaatcagcatattattttcaattataaaaccttttttaaattcgtagagtttcctttggtcatcgaaatttacaattttctgataagaggcgctgttcaagttatctatatagacgtaaaaagcattaggacaatattttactttcttggctttttgtaatgctcttccaaaaaaaacagcgtcttcaccgattttcatatcttgtggaaattgtattttgaaatccagtaataattttcttttatatattttagcgcacacagcatttacatcatctgtcagaatatacgtcatttttatttcatcaagggtttcctgcgcgtttcgcattgtaagtatttcttgaatcacatcatttttcttcctgaggtaattatataaagtaatatcattttctttatactcctctaatttttcccaccaattatcacaaaaagcatcatcgctatctaaaaacacaagataatctttttgtgcacataatagccccttattgcgagccgcggaaacccctgcatttttttgctttattaactttatttcatctgtatagttgcgctctaaaatcttgtcagtaccatcaacactcccatcatcaataacaattatttcatagcccttatatgggcatttcagaactgaatccagacattcacaaatagtcttttctccattatatactggtattattattgaaagattgagttctctttccatcttaaattcctctcaatttctaaagaaaacatatggtattgtttctccgtaattcaactgtacaatgtcatgcatccatggtactactgccagcaaaatcattatcactttccaaatcactcttgatttttcttcaaagtattttctatttattatttggcactcataggctagcggagtaaaataatacgatactctcaaaaaataatttgatattatcgtactaaacgacatcaccagcaaaatcacagtcatcattgtaaaaaatattttattactccctttcttgtccgctctatgaaatctatagaaaaggaaagaactggaggcacaaattatggttggtccaataatattaaataaagccaatccaccagaaccaccatattttccgctactaatataattcaaatagctactccgcaagattcctaatgtaacaaagtatttaataatttgattaatgaacaggacgatgcatccgcttatcaaaagaaatatacttgctcttataaatcgtttcttttcactataatttctgttgtcctttaatataagatggcatccaaaaatcactagtgatataagtcccgatgaatgaaaagagcaggcaagaacagctagtacggagaacaacttatatctatcttgtaaaaggtatgccgtagcacaatatacaattgctaccgcaatgagctgtcgcattgcattcaatgatgtattataaaacaaaaaacatacaagcaacattctaaatgcgaccgaatctccattcatttttttatattccatgcatcctttcaaaaagaaggaaaatgtcaaaaatgaatacgcaaacagtccaatgtgataatctttaaatgccctagttaaggcaaaattcaaaagatgaaatgcatagtcacttgcctctccagatattgttagcctttgaaacaaatcttttatggatacgctactatgtgcaagattataaaatctcaccccatagaccataacatctgtacctaccacttgatctctgcagcctgcaacaactgccaatatcataactccgaagaaaaaacttgcatatttaaagctcttattatacgctttttctccacagtaaatgcaaattgtcgaaatcacaaagcacatcaaataaatccacattcgcaagtgtctccttgtattttctaagatatttgcaacttttttgttttaaaaaagacccacctaactaatttaaagcttattgttgataacacaagcgccactctaattttaaggtttgtctttgtatttgtaagcacactgcttcgatattttacaatatactcttcaatttcattcttttctatactctgtttctctggtgttttcaaatatattgtaaaagcaacattaacacttctaactatcacctcgtcaaagtactctgaatttttctgactttccgcaaacttcacaagttcttcaaaggatcgcatcagtttcggtgaatatattttattgttcatcaaactggtttcgacaaaattatagttatatagtttgagattacaatacgtcacaacttttgctttacaaattgcaaaatagttaaagacaaagtcctctccaacattcatcttttcattgaatctcaagttttgtacggctgattttttgtacaactttccccaaactgctgttggctcaagctcatcaaaaacatggatattataagataaattctttatagcctccgctgactcaaccgttttcagacactgatatgcgccgtcataaatcgcattatcatcatttttctcttttacgtgcttgcagctacaaataacaatatcagcgtttgtcttttgcacaatagcgaaaaggacctcaatcgcattaccctttaatgtatcatcgctatccacaaaaaaaatgtaatcgcctgttacagtctcaagcccacaattccttgccgaagaaacccctccatttttcttgtgaatcactcgtatgcggttatctgttcctgcataggcatcacaaattgctccacattgatctggtgaaccatcatcgaccagcacgatttcaagttttcggtagctttggtttattacgctctcgattgctttgcgcagatggctctcctctgttttataaacaggcatgattacagatataagattttgttccatatggttccttccttagaaagagccataataataggaagctgcatctactcaatatctcgattgtttgatttgtttcaatatactttgcggtataagaccaattatcaccggtttgaatacataaggcatccctctcaacaacattctcatgttcttatacccacgaaatctcacaatcatttcatccacacgatacttcatcggtcgatgtttgttcttttcatccctaacaatgcgataatagtatagcttttcctgaatattatagcccctatatccctttgcatataaattcatgaaaagatcataatcttcgcatcgtcttgtttctttggcttctctgtaccccccccgataataattcggctttacgcatcattgtagttgggtgcataaacggactattccaaagaaaatcacccttctgcggtttttctggaacagtatattctccccaaatgccattgttatcaaaaacatctgcgcatgttcctacaatcgcatattcacgattttcatccaaaaactgcacctgcttttttaagcgttctggctttgaaacatcatcatcgtcttgtcgcgcaatatatttcccttgagatacggcaaggcactcattcaacgcgtgatttagcccacggtttttctcataagatattattttaattcttgaatctgattgggcgatttttttcaactcttccaaagtgttatttgtcgatccgtcattgcaaataatgaactcatagtccttataagtttgttgcagtatcgactcaacactttttcttagtaaattataatttttgcaattatatacgcccattattattgaaacatttggcattctttcaccttatcttcataccaatcttccagtttttttaccgcataataaatatcgtaatccttgctattctcattaagaactacaattttattctccattgataagattgcgcttacccaattagggctttgcaaactcaaccgaaccactccattgctaattatggcttcttctggtattgcatctgaaacaaccacaggaacacctgcaatttggctttctatggttgccaatgacaatccctcaaatacagacggaacaacaataacattcgctaaccgataatatagttctggattagacacctgtcccgcaaaaacaacacgattttccaagcctttcgtcttaactgaattatgtattgtctgatttagttctccatcgcctacaagcagcagaacagcatcatttctaacatcgcttatttttttgaatacatctagcaggaattcatggttcttcgcaaatgtaaatcttccgatatgtccaattacaaacttatcattcaatccaagttgtttttttaatttttctattatttcttcacctactctaaatctttcaaagtccgttgcgtttttgattaccacaactttgcctgcgtcgtaatttctatttccaaacatccaacgtccagctttttctgagcaagcaaaataatctgttgggaaaactcgtccaaatatacggagaaaatatttcagcgcatctcttttcagttcctttccacttgggacactatgattatgagccaccctcactggaacacgacacatccacgctacgaatagtggaaatacactcagtgtgtttagatgcgaatgaactattagatactggttttctttaagatgtttttttaattctcgaatatactgagggagtttctgataaggaggaattttataaaaccttgcgcccatatctattaggttctgtggaggttctactgtagaatcagcatcataataaaaatcaaattgtattttgcttttatctatcgcacggtagtagttgaaaaccaccatttcaactccacctgcccacagcttacccataatttgagcaactctaatgggttcatctttttgtttcatccacatttctctgctatccttacaactcatcaaactctataacccttactgtcaatcacattcactacctcatcaacatacttctggcaggtatcgtggtcaggagcttctaccatcacacgcaccagaggctccgtaccagactcacgcaccagaatacggccggtatcacccagcgcttctgcaactgccttgactgcctcctgtaccgctgggtcgttctgtgcagccttcttatcggtcacacggacattctccagaacctgcggatagatcttcagcggctcagccagcttgctcatgggcatcttcttggccagcatgacttccatcatcttcaggctggtcaggatgccatcaccggtgctggcgtacttgctgaagataatatgaccgctctgctcgccaccgatacggcaaccgttcttcgccatgtactcgtagacatacttatcgcccacagcggtcttggcatagccgataccctgttcatcgaacgctttgtacaaaccaaaattggacatgacagtcgtaaccacagtgttggtcagcagcttaccacgttccttcatgtagcagccgtagatatacagaatatggtcgccagtgatgacattacccttctcatccacacacaggcaccggtcagcatcgccatcgtaggcgaagcccacatccaagcccttttccaccacgaacttctgcaggccctcgatgtgggtagagccagcgttgttgttgatgttcgtaccgttcggcttgttgttgatgacataggtatctgcgcccagagcatcgaacacagatttagcaatattccagcttgcgccgttggcgcagtccaaaccgaccttgacgcccttgaaggaatagatgcccagagagatcagataacccatgtagcggttacggcctgccacatagtccacggtgcagccgatgtgctcccggtgtgcaaagggcagctccggccagtccttgtcaaacacatggagtttgccgtcaaggtagtcctccaccaacagcagggtctcctcgggcatctactcaccatagcagtcgatgagcttgatgccgttatcatagaacggattgtggctggcagagatcataatgccgcagtcgaagtcatccacgcgggcaatgtaggccacagacggggtagtggtgacgtgtagcagataggcgtctgcgccggaagcagtcaaaccagcgaccagactatactcgaacatataagagctacggcgggtatccttgccaatgacgatgcgggcaggctcgttgtttccattgcgctcgcgcagtgcattgtagtaccagccgaggaagcgacccaccttgtaggcatggtcagcggtcagatcaataccagcttcaccacggaagccatcagttccaaaatacctacccattttaattttcctccataaatcaaagaaatcttcaacaatttctactcattcaatttctcatttattcattgtacgacaacaagcctgtatacagattgctgcggcaatctatacgcaggctcaccttcgtacctccttattctgttttctgctctatcagctttcgctgtgggtgggttaagtatagagcgcaaccagaagccattagcacctgaaatcacgctggccgtaacgcaccatgacaggcagaaacaggttgaggtgaaaaggtcaagccgcgtaaacccgcatgaaatcaggcttttctctggttgtccatattatttcacactcccctttacttgtaacaacgtccaatccccatacattcgatttttgggtcattccagccaacacaaagagcggataggctcgtgcacctgtccgctggctgtcaccccaccctcatggtcgagatttctttctggatggcattgctgccacccaaaaagatcagtcgttcattcttcgggtaagaaaatatgaacttcgggttgcggagcctttcattctctgccgtacccttgtccctattatgacagccgcgtattatttcacactcccctttacttgtaacaacgtccaattcccatacactcaattctttggttgtttcagataacacaaatagcggataggctcgtacacctgtccgctggctgtcaccccaccctcatggtcgagatttcttcctgcgcggcatttctgccgctcagaaagatcattcgttcattcttcgggtaaaaaaatatgaacttcaggtcgcggagcctttcattctctgcagtacccttgtccctattatgacagccgcgtattatttcacaccccccatggacggtaactacaactcttttaccaaacatcttcggcagccatgtaaagaaggccggcccctctgcatcaggtactcaacaacagttttacgaggtaggtgataaactcatggattctcattgttttctcttgtttttcgccatctcctcaaaacttctgaaaaagctgtgccaattttgtgtcgcaggggccaaaagttcggcgttttagttcatatatagttcatataactgtaaaacacgaccggttttagtgccccatatagtgtgcaaagcaggttctttttgatgatgctacgtcagtatggtttatcggccgcacatttccctcttccttatctccaacagcactccggtcaaaatcaccagcgagcaaagcagggtcagccaccagttttcggtaaagccggcgatcaggtagccaacagcacacacggcaatgaccacaaaggcgtactgcatctgggtttgcacatggttgatatggttggactgagcaccggagctggacatgatggtagtatcagaaataggcgaaatatggtcaccgcagacagcaccagccaggacagccgctacagaaatgatcatcatggtcggatccagttcagcaaacatgttgaccacgatgggcacaaaaatagcaaaggtgccccagctggtgccggaagaaaaggcaataaaaattgcaatgcagaagatgaccagcggcacaaagttcatcaggctggaattcagattgatggccgaacgtacaaaggtaccgatacccagggcgtccgtcatacctttcagagtccaggccagcactaaaatcaggatggcgggcatcataagcttgccaccttcgggaacggaattcataaaatccttgaagccgatgacacggcgcggcagatacagaagcagcaggaatcccactgtgaccaaaccggcaaacaccaacgcttccgaagaagaacagttggcaaagtcctccaccagattctggccgccgttcaggtggccggtccagatcatagctgcgattgccgttgcaatcatgacgaccatgggcgcaatcagatcgatgaccttgccttttgcgtatttgcctccctcggtcgggtcttttgtttcctggttctggaactcttccccgccggaggtgaacagatcacctttggccgcgttctcttcatgctttttcatcaggccgaaatcgaagcctacaatggaggtgaagaacaccatatacagggttaaaattgcatagaggttgaacggaatggttttaacgaacatctcaaaaccggacatggagctgcccgccggaacgtaagagttgacggctgccgcccaggaagaaatcggcgcaatgatgcagactggcgcggcggttgcatcaatgatatacgccagcttggcgcgggaaaccttgtacttatctgtgacagggcgcatgacagagccaaccgtcaggcagttgaagtagtcatccacaaaaatcagcgcaccgagcagagaggtcgttaccaaagcggagcgcttacttttcaggtggccggaggcctactcaccgtaagcgcgggtgccgccggattcctgcatgagcataacgatcatgcccaaaaggatcatgaacatcagaatggaaaaatccacactatcgatcattgtgttaaacagcgtatcaaacgcaatccacgggtggaattctgccgccaacagtgcgccaagggcacaccccgcaaacaatgacaaatacacttctttggtcagcagtgccagcgcaatcgccacaatgggcggcatcagtgaccaccatgttcctacaaacatcctttattcttcctttcctcttttgatctaatcaaagttattttagcatattgtccatgccgattcaatacgcaaaaaataatatatcctagggcaataccgcataattctaagtgccgatacggcgagcgaggtgcggcagctgctaagccaaaagcgcagataatactttgtgtattatcgagcattttggcaacgcagatgccgtgccgcagccgccggagcggtgcttaagccgtaa

SEQ ID NO: 1144 - DNA, 5467 bp, unidentified
  source 1..5467: mol_type = unassigned DNA
tattcacccactgaatccgaagttatgatgaacgagaacaacgatgtttttacaatggaagacgagccgatagcctctgttatgcagaatatgcgcaaaggctcgaaatggctgtccgcatttctggaaagttaccgtcctccgttggacggggagcgttacctgacggacggcgaggtgtcggaactgctccgtgtgagccgacgcaccttgcaagaataccgcaacaaccgcgtgttgccctttatccttttgggagggaaggtgctttacccggaaacggtgctgcgcgaggtgctggaagcgaactaccgcaagccgttatgatgttgattttgtagttagaaataaaaagattacttttgcaatctgtttacgcttagtcgtaatcacttgctcaatctcatgtgcgcttgggtttccaatgccatcgtacttccagctcgttctgggagcagtttcattctttaatacgttgggaaaggggggctttaagtatgacaaaaactataatgaaggcggtaggggctgtagcggcaggccgaaacaggaaagttcatatgaggatagcaagtgtaaccatatattgcgatgaaggctccaagggttcgaatcctgccaccccgacaaaagccactgataatcagtggctttttcttttttcggacacatttcggacaaattatatctgaatattgattattcaataacctaagcaaagttaagttaagctagaagaataacccttcttaaagaatgattggaacataatgcttgtttctatagagcgtgaaaagttcatcttattcttataaaaaatcaagagggctaggagtcttttgcttgtctatgtcagtgatatgagtgtagatcatagtcgtttttatattttcatgacccaataactcttttacaattcggatatcgatacctgattggattaaatgtgtggcataagaatgtcgcccagtatgtacagagccttccgactgaacatttgctttgatcaatgcttttttcagaatcaactgtacacttcgttcgctatacttgccacccttctcaccttcgaagaggtactcctttggcttgaatgcttgataataatgtctcaaagtcgccagcaatttgtctggtaatgatacaatccgatctttattacctttgctttgatggattctgataattccatcggaagattttatgtctttgattttgagattcaacagttcgctaagacgtagtccacaactatagattgtcatcagaatagccttgtgttttagattttgagtgttatcgagaatatttcttacttcttcttttgaaaagaatttaggtaatttagaaaatgagcgtttcgggtataagtaatccagttggatttttttgtccaatatcagttcgtacatcttcttgattgcgcccactaatcctttttgataggaaacactaattttcccattttgaactttttcgtttataaacgcctcaatatctgacagtggaatttcttcaagggagggatatttactaacatgtttaagaaatatactagcgtaatccttgtacgatctaatggtattgccagcatatctctgcatcagcaatctcttttcgaaggtttcaagtatgatttcgctattcatatcagggaaatagtattttataatattttgtttcgctatttgtgcggttttattttttaaatacaaatatatcaatatcttatgtagaaagaaaagtcaaataacgaaacacgtatatagggttggttaagcgaaattttccgtatattcgtttcgttaaaacagatgttgttatgcggcagcttaaaagacgacaccaaaccagaaaaatcatcttgacaaccacccgactttgaactacgaaggatgaaatttttcagggacaacttccagcatttccaaaaaacagtttaaccattgacttggagacaaacaaacaatttgagcattaaggtttaaaccgaatttttccgaaattgtcctgacctgacttttcctgaaaatcgactttaaagctgtttttacagataaatcaggtttctctaacagacaggaaataaatgctaagtatttggctttaatcttaaaatcaaaaaataagtgttttcttttaatgtttaacagggctgattttacagttggcggtggcaagaaactttcaggacctacctcatagacaagtttcaaatcaaaaaaagtatgatagaaaacggtatatggattgtaaagcttccttgaaaataacttttatgtaggttcgaactgaaggacaatggaacctcccagaaaattttcaagattctcaaacatcaggattttgaaaatatcggaagtaatgccataaggaatatttgacaccactttgaaaggaaatttcggaactgcaaaattcctaaaatcacaaccgacaacttgaacatttcgggcatcagaaaataattttcgtaaatgttcaaccaaagctgtgtcgttttcaatagcaacaacattgttggcaatttttaataaatgaacagtaagaaaccccttgcctgccccaatatctaaaaccgtatcctgattacttatatttgcttgtcttattgcatcttttattagcactttatcaatagtaaagtgctgacccgtaaaacgaacgggcaatttcttttttgtcattagtaacttcttacaggtgaatacttgaattcaaatcacagagatattcttttataattatacaacggcaaatttagtaactttgctcgataaattaacgagaaagaagaaaaaatgaaagccgacagcataacatcacctatacgcaagcaggggtttcgtgcttctatgacagtgaagtggtaaatttgaagttcagttcttcgtaggaagttcagtggttaaaatccctgcctgcgtatagctgagaaccgttgtgggctattttgcacacgacacgacaaacatcaaatgactatcgaaatatgagtttattaaacaataaaaaagttgcaattatcggtggcggaccagttggactaacaatggcaaacttgttacaacaaaacggtattgacattaccgtttacgaaagagatgaaaacccaaaagcacgagtttggggcggaacgcttgaccttcacaaaaattcaggacaagaagcaatgaaaaaagtaggattgttgcaaacctactatgatttggcgctacctatgggcgtaaactttgctgatgagaagggtaacattatagcaacaagaaacccgacactcgaaaataagtttgacaaccccgaaataaatagaaacgcgttgcgaaaaatgttgcttggcagcttgaaaaatgacacagttgtttgggatagaaaatctattgggcttgaacaagaaaacggaaaatggctgctacattttgaaaataagccaactgcattggccgactttattattgtttccaatggtggaatgtctaaaataagaaattttgtttcagataatgaagtcgaagaaacaggtacttttattattcagggcgacattcctgaaccagaaacgaactgccctgaattttataagttgtgcaacaacaatagactaatgaccgcacatcaagggaatttattagttgcgaatccatttaacaacggaatgttaacttacggtgtcattttcaaaaagcctgaagaatggaataatggaaaaggattagattttaaggacacaaaaagcgtttccgagttcttgacaaacaggttttcaaattggagcaatgaatacaaggagttaattcgttcaacaacttttttcgttggtttaacaataaaaatatttccgctagacaaaaagccttggaagagtaatcgtccgttacccataactttaattggcgacacagctcacctaatgccaccttttgcagggcagggcgtaaacattggactaatggacgctttgattttgtcagaaaatcttacaaacgggaaatttggaacgatacaaagtgctattgatgactatgaacaacgaatgtttgtttacgcaacagaagcacaagcggactcgacaaagaatgaaatagaaatgcgaaatccgagctttacttttcaacagctaatgaatgtataactcgacagacaaaaaaaacagcccacaacaatcggcttgaaacgcaaggcggggtaaacgtcttcgattgaacatttttttctaattttacggtatcggcttcgattgaaaggtagtggtaaaaacccgccctgcgtcaagccgccggacgttatgtgccatttttgaatgacaatgcgaatagatacagacaaacaaatgaatttacttagtgataagaacgttgcaataattggtggtggacccgttggactgactatggcaaaattattacagcaaaacggcatagacgtttcagtttacgaaagagacaacgaccgagaggcaagaatttttggtggaacccttgacctacacaaaggttcaggtcaggaagcaatgaaaaaagcgggattgttacaaacttattatgacttagccttaccaatgggtgtaaatattgctgatgaaaaaggcaatattttatccacaaaaaatgtaaagcccgaaaatcgatttgacaatcctgaaataaacagaaatgacttaagggctatcttgttgaatagtttagaaaacgacacggttatttgggatagaaaacttgttatgcttgaacctggtaagaagaagtggacactaacttttgagaataaaccgagtgaaacagcagatttggttattcttgccaatggcgggatgtccaaggtaagaaaatttgttaccgacacggaagttgaagaaacaggtactttcaatatacaagccgatattcatcaaccagagataaactgtcctggattttttcagctatgcaatggaaaccggctaatggcatctcaccaaggtaatttattatttgctaaccccaataataatggtgcattgcattttggaataagttttaaaacacctgatgaatggaaaaaccaaacgcaggtagattttcaaaacagaaatagtgtcgttgattttcttctgaaagaattttccgattgggacgaacgctacaaagaattgattcatacgacgttgtcatttgtaggattggctacacggatatttcctttagaaaagccttggaaaagcaagcgcccattacccataacaatgattggggatgccgcacatttgatgccgccttttgcagggcagggagtaaatagtgggttggtggatgccttgatattgtctgataatctagccgatggaaaatttaatagcattgaagaggctgttaaaaattatgaacagcaaatgtttatctatggcaaagaagcacaagaagaatcaactcaaaacgaaattgaaatgtttaaacccgactttacgtttcagcaattgttaaatgtataa

SEQ ID NO: 1145 - DNA, 14742 bp, unidentified
  source 1..14742: mol_type = unassigned DNA
agctgccggagcggtgcttaagccgcaaggcgggaattgtgcggtgttgccctaaattgcttataaaagaatcaccacacaattctaagagccgctgcggctgtgtttagaattgtgcggtgatgtttttatccagctaacgcccacgcgcccataagaaccgtcacaaacaggatgttggaaactgtgaacaacgcaaaataccggcctttttgtaacggcaactcccttgcaatttcgcgatacgagatcaggctggccattgaggcaatcagcgtgccaaggccgccaagatttgtgccgatgatcagggagcggatattctctgtaaatcccgaaagcaggatcgccgcaggcacattgctggttacctgtgaggcaagcacagaaacccatacctcgtggccggtaagaatatgctgcagccatccggaaaaggcggcaaaacgccccagattgccaataaagataaagagcgcaacaaaggtaaggatcagcgaatagtccacacggcataatgtgttccggtctgccaaaagcacacaggccagaaccgcagcaaacgcgataccatagggcagaacacgcagtaccaccaacagacagagcacgaataaaatactgtacagcgataatagtgccttgttcgggcttgcagcagccgcagaatgagccatggagatctttgcgccacggcggcacagccccaccgcccatagcgcaagaagtgccagcgacaggatggagtaggggagcatcagcaaaacaaaagaacccatatccattccgctttttccatacaggtacaggttttgcggattaccaagaggtgttagcatactgccgaggtttgcggctatcgtctgcatgcagacgatgggaagcagcagcttatcccgaacggcagcatccaagctgtttacaacaacaaatgtgaacggaacaaaggtaagcagcgatacatcattagtgatcaccatgcttgagaaaaagcacagccctaccagaacagcggtcagctgaagcgttgtgcgggtatgggacagcaacgcgcgcccaagccgatcgaaaacgccctgcccccgcagcccggccatgacggtcatgagtgagaacaggatcgcaagcgtgcgaaaatcaatataaccaagatattctgcatccggaagaacgaagcaggatgaaaccaaagccagacaggcagcaatgcttagaacaggctctttttgaaaaacgcgttttatcgccatggcaggaagctcttttccgtaaatttcaatttcaaatgctgtgccgcatacgacagcaaaccaatgcttgaaattcgtcacattattatacaataaaagccaatccggcacaagagcagtcaacactttaaatatcatcccaatcactaagaggaaattccccaaatacttttttcaacgcttgcaaataaaggcggatttacgcctgagtttgcaggcgtttttatctataggtggcggaattgtcaatagacggagcgggggagtgccctcacccaaagtattgcattgcgtctacctgtcagcagcaatggcagcgctgcaggtgatgatgctgtgcgaatttttgcatgatgttcgcttctggtagagagaataagagatcagcataattagataaatatttttacctaacaatattgacatacaagacaaatgtgatataatagccttgttggcaattgagtcaatatttttagataaataattacgaggtataaatcatgagctttgaagaactgaaagaagtatttgttgataccctgaactgcgatgcagacaaagttacgatggaagccagcctgaccgaggacctgcaggcggatagcctggacgcggtggagctgaacatggcgtttgaggacaagtttggcatcacgattgccgatgaggacctgggaacgctcaagaccgtgggtgatatcttcaactatctggttgcgcgggcagcctaaagggtattagggatgaatgccattgaaaagctgttcccggtcagccagcaggagcgcagcttccagctgaaagtccgccgcgatgctggtacggctgcgcccggctgggtgcagccgcaatttgttgaatgtaaaaaatgcggccgccgcgccacccgccaggtctggaccaaaagcctgtatgtatgccccaattgcggggtacatctgcccattggagcctattaccggctcagcacgattttggaccacggaacctttaaggaactgaatccagaccttgcccccaacgatgtgctgcattttcccgattatcaggaaaagttggccgctgcttcggtcaaaacgggcctgaaagaagctgccgtcaccgcaaccggcaggatcgggggcgtgcaggcggtggcagctgtgctggacagccgattttttatgggcagcatgagcactgccgtgggggagaaaatcacccgtgcaatcgaatatgctgctgataaacggcttccgctggttattttttctgccagcggtggagcgcggatgcaggagggcattttcagcctgatgcaaatggcaaaaaccagtgccgcgctggaacggttcagccgcagcggcgggctgtatgtcagtgtgctgacccaccccaccaccggcggtgtcacagccagttttgccagcctgggagacatcacgctggccgaaccgggtgcgctgatcgggtttgccgggccgcgtgtgattgaacagaccatcggagaaaagctgcccgatggtttccagcgcagtgagttccagctggaacacggctttgtggatcaggttgtgccgcgcactgaattaaaaggggttttgacgcggattttgcagctccatacacaggggaggaaatgcagatgatcaaagaggttttgcagcagctggaaccgctggacgcgcagattgatgcattgtgtagcagcaccgatgatgccgaaatggcgaatacgactacccatgccgctgagctggcagagctttccgcccaggaaaacatgcttttgcagcgctgcacatcactgacgccggaggacagagtttttctggcgcgccgccctgaccgcccgcatatcggcgaaatcatcgacaacctgtttaccgacttttttgagcagtgcggtgaccggcaatgcaaggaggacgcggccattttgtgcggtatcgcgcgattccatgggatgcccgttacggttttggggcaccgcaaaggaacgacgctggaagaaaacctgcgctgcaactttggcatgccgggaccggaaggctaccgcaaggcgctgcgcgtgatgaagcaggcggaaaaattcaggcggcccatcatcacatttattgatacccccggtgcttaccccggtaaggatgccgaggagcgcggccagggggaggccatcgcccgcaacctgatggagatgagcggtctgaccgtcccggtactggccatcgttacgggcgaaggctccagcggcggcgcactggggcttggcgttgccaaccatattctgatgctggaaaacgccgtgtattcggtgttgagccccgaaggatttgccagcattttgtggaaagatgcctcccgcagcggcgaagcctgtaccatgatgaaactgacggcgcaggacttgtatacggatggaattgtggaagagatcatcgccgaaccgctgggcggtgcacagcgcgggcggcagctgcttttcagccggttggataccgccattgccgcgcaccttgccgccttgtgcaagatgagtggaaaggcattggccgaccagagatacaaaaaataccgccgtatcggagaaatgaggggagcatgaaaggcttacagctgctggccaccggcggggcactgcccggccatgtagtgacgaatgaggatttgagccgacaggtggacaccagcgatgaatggatcacgacccgcaccggcatccgccagcggtattactgcaccgaaagtgaggatgccgccacgctggccattgccgccgcccgccaggccctggcgcgtagcgggctggcagcaagcgagattgcctgctgcgttgcggcaacgctttcggctccaacggctacccccagtgttgcctgccgtgtgcaggcggccttggggctgccggagaaccggcccgcttttgatgtaaatgcagcttgttccggttttatttatgctattgctgcggcccacgggctgttgaacaccttgggcggacgctatgcgttggtcatcggctgcgaagcgctgtcccgcatggtggacccgaccgaccgcacaacctgcgtactgtttggggatggcgctggtgcggctattctggaactggccgaagatgtgccgtttgccgtcacgttgggcgcgcgggggagcgaagccatccgtgtcggcggccccgcagcctgcgatacggccccgatcacgatggatggcaaggcggtctttcgttttgcggtggaaaccatgccgcgttgcctgcaaaccgtgttggagcgcagccaaaagaccttggctgacctggattgggtcgtctgccatcaggccaatagccgcattattgaccattgtatcaaacacttgcacgcagaaccgtcaaaattttataaaaatatggaccgccatggaaataccagtgctgccagcattcccattgccctgcatgaaatggtggaaaatgatttactgcaccccggccagactctggcctgcatcggttttggcggcgggctgacctggggcggaatgctgctgacgtatgagggtagaaaatgaagctgctcaatgaaattttaggtacgaaatatcccattatccaaggtggaatggccaatatcgccacgggcgaatttgccgctgcctgctctaacgccggggcgctgggcctgatcggttccggcggtatggatgccgatgtcctgagggaaaacatccgccactgccgtgcgctgaccgaccagccttttggtgtcaacatcatgctgatgcacccgcaggcagatgaatttgccaaaatcgtggtggaagaaggcgtaaagatcgtcaccaccggggcaggaaatccgggaaagtacatggcaatgtggaaagcagccggcatcacggttatcccggtggtagctgccgcaatcttagccaaacacctggaaccgcttggcattgacgctgtcattgctgaggggacagagagcggcggccatgtgggggaaatgaccacaatggcgctggtgccgcaggtcgttgatgccgtccacgtgccggtcattgccgcgggcggcattgctgacgggcgcggtttggccgcagcgctggcgctgggggcctgcggcgtgcaggtcggcacctgtctgctggccagcaccgagtgccccatccacgaaaactacaaggcagcgctgctgaaagcccgcgacagcgataccattgtgaccgggcggatcggcggcaccccggtgcgtgtgttgaaaaaccgaatgagccgcgagtatgtccggcaggaaaaagccggggccgacaaaatggcgctggaacgctttacgcttggcagtctgcgcaaggctgtgtttgacggcgacaccgaaaacggaagcctgatggccggacaggccgcggggctgctgcatgaagtccgcccggtagaagagatttttgccgcaatggtaagcgaggcaaagacctgcatcacggggttgtacaaggagaccatctgatgaaactagcatttttatacgctgggcagggcagtcagcatgccggtatgggccaggacctttatgaaacctttcctgccttccgcgccgcctttgacgaagctgccgcagcggtggattttgatttgaaagaagtctgctttaccgacgcggcgggcgtactgaaggaaacgcaatacacccagccttgtatgacagcttttgccaccggtctgaccgctgtgctgcgggagcagggcattatgccggattatgcggcgggcctgtccctgggggagtattccgctttggcctgtgcgggggtgttcgatatgcagacagcggtcgctttaacggctttccgtggcaaagcgatggctgctgccgctgccgggcgcacctgtgggatgacagccgttttgggattggatgaaacatccttgcaggcatgttgcagcgcagccgccgaagagggcgttgtacagatctgcaattacaactgtcccggccagctggttatcggcggcgagaaagctgctgtagacaaagctgccgacctggcgcttgccgctggggcgcggcgctgcctgccgctgaacgtcagcggtgcgttccatacgctgctgatgcaccccgccggagatgcgctgcgggaaaagttccaatccatccattttgcgccgatgcagttcccggtgctgttcaactgccttgggcatgaaatggcacagaatgacacggtcgccacgctgctggaaaaacaggtgcagttcggcgtacgttgggaagccaccgtccgccgtttggcggaactgggggtggataccgccattgagatcggccccggcagggtgttgaccggatttgtgaaaaagacggtgggaaatgctatctcgtgctatccggtggaaactgctgcacagctgcagcagttgctttgcaccatgaaaggagcctgaccatgccgcaaactgaaagcatgcgccgtgccgctctggttacgggcggcgccaagggcattggtcgtgccgtctgccttgcattggccgaaaacggcatgaacattgcagtcaactacgcaggcagcgcagccgcggccgaggaaacagcggctgcctgccgcgcctttggtgtgcaggccatcacgctgcaagcggatgtgcgcagccccgaagcctgccaaaatctggtggaagataccgctgccgcttttgggcggatcgatgtgctggtcaacaatgcgggcatcaccgcggataaactgctgatgcgcatgaccgaatccgactttgacaatgtgctttttaccaacctgaaggggacgtttttctgcaccaaagcagcttcccgcttgatgatgcgccagcggtatgggcgtatcatcaatatcagcagtgtggtcggcctgcacgggaacgcgggccaggccaactatgccgccagcaaggcggggctgatcggcctaacgaaaagcgttgccaaagagtacgccgcacgcaatattaccgccaatgcggtggcacctggatttattgaaaccgatatgaccgccgctatgccggaatctgcccgcgccgcagccgcagcggccatcccggaaggcagaatcggccgtgctgaagatgttgccgcggcggtggctttcctggccggggaacaggccggttacatcaccgggcaggttctttgtgttgacggcggaatgggaatgtgaggtgcagctatgaagatagaaaagaaacgccgggtcgttatcaccggccttggcacggtaaacccaaccggcaataccgtggcggaaagctgggccgccgtgaaagctggccgctgcgccgttgggccgatcacggcttttgatacaacggattttaaggtgaaactggccgcagaagtcaaagattttgaccctgccgaacgtattgaccggcgcgaagcccgcaaaatggcgcggtttacccagtttgccgtggccgccgctgacgaagccatccacgacagcggcattgcactggaaaatatcgaccacacacggttcggcgtgatcctgtccagcgggatcggtggtctgcccacgatcgaggaagaacacacccgcggccagcagcggggctttgaaaaggtcagcccctactttgtccccatgtccatcggcaatatggcggcggggcaggtggccatccgctttggcctgcagggtatgtgcagctgccccaccactgcctgcgcaggcggtaccaatgcgattggggatgcgttccaccgtatccgcgatggatacgaggaccgtatgctctgcggcggcagcgaaagctgcatcagcccgttgggggtgggcggcttcgccagcatgaaagccctctgcaccgcagacgacccggcccgggcctcgatcccctttgatgcccggcgcagcggttttgtgatgggcgagggcagcggtgtgctgctgttggaagaactggagaccgctaaagagcgtggcgctaagatttacgccgagattgtgggctatggcgctaactgcgatgcttaccattttaccgccccggcaccgggcggtgcaggcggcgcgtcctgtatgcggctggcattggctgatggcggagtggagccggaacagattggctacatcaatgcccatggaacttccacgcatctgaatgacagctgtgagaccgcggccatcaagtcggtttttggcagccacgcgtataagctggccgtatcctcgaccaagtcgatgaccggccacctgctaggcggcgccggcggggcagagggcgtgtttaccgtgctggccctgcacgatgcctttttgcccgctaccgtcaacctgcaggagccggacccggaactggatctcgactatattcccaaccagggccgcgcgttacaggtggaatatgccatgagcgacagcctgggcttcggcggccacaacgcctgtgtggtgttcaagcgttgggagggatgaggatgaactatacacccaatgaaccgccccggaccctgacggcggcggaaatcgaaaagatcctgccgcaccgttacccgtttgctctggtggataagattcttgactatacccccggccagtgggcgcgcggaatcaagtgcgtgacccgcacagagtcgtttttccagggacatttccccggccatccggttatgccgggggtattgattctggaagcccttgcccaaaccggcgcggtggccgcgttgagcctgccggaaaaccgtggaaagattgccctgtttggcggggtaaaaaatgcccgtttccgccgccaggttgtgcccggcgatgtgctgactttggaatgtgagctggtagagcagcatggcccggtgggcatcggcaaagccaccgcctgggtggatggtgtgcgcgcggccaacgccgagctgacatttgttatcacggatgcctgagggctggttttgcatggtggattgtgctataataaattcattaacctacagggggattctcgccatgctggatcagacatttgggcaggtatacacaaaattcaagctgcatttttataaacagatcttcagccgttttgaagaccgtgaagccacgctgacgacggtagaatctttctgcatggaagtcatcatggcactgggggaacccacgattgcgcagttcagccacatgatgaatctttccacccccaacgcagcttataagatcaactccctggtcaaaaaaggctatgtggagcgcatccaatccaccaccgataagcgggaataccgcctgcggccgacccaaaagtacattgattactataacatcagctattcttacctgcatctggtcatggagcgtgccaaacagcggttcagccccgatgacctggccaagctggaagaaatgctgcagatcgtatccgatgaactgatgccggaaattcagctgccgaaataaaatatacattacgataacaaaatgcgaaccacttcgtacaacgtggttcgcattttgtgtttatatgattattctgttggtaactcttggaccttttgaacagattgatgccagccgtacaggacattgcaaaagaacaatctcgccaaaatcaataatccatatcaaacaggtgggccatcgggacagcgtcttcccgttcagcggtcagctttttcaaacgcagcgggtccgtattccagcgtgccgacagtggctgcctttttaagttccatgcgttttcctccttaaggtgtattagaaaacaaagaaaatgacggatatttcgcaaacacaagcagaatttaaggctttttaacgcaaaatccggccgtgtttgtagaaatagactaaatttttgacttttcagatacaccctaggttgccgtgctttcgccccgccgcaaaactcctaactacatcacgcgttccattctttcggaaggtatgcgcgggtattgtgcagcatggtgtcaaacagttctttgccctggttccagttcagggtcacctgcgggtcgttcataaaggtggtcaggccaagggtgcggtcgcaggtcagggcagcggttagggtgttctcctgattgtaaacgtggcgggctaccagcggcagaatattggcgggcagcgggccggcgttcacggactgtacgccctggcggctgaacagcgcgttcacttccaccacggcatcccacggcaggttggcaatggcaccgtggttgggaatgttcacgttgctgaccaggtcgcccaggccgagcagggctttcatcagcaggtggccttcctcgccatcgggcttgatctcgatcggctcttcaccggtgcgcaggcggcggctgcgggccaggcgctcctgcagctcatttttgcgccacgcaacggtggtcaggccaaacttccattcgcgcacggcttcgggactttccagataagtcttgcccggcataaactctgccagatggcggtcgcctgcggcggcaatgcagccatagcgcaggaacaaatcaaatttaacgcggttggcgcaggcaaaggaactgttcatccaattcgtgtcgccgtactcataaccggattcatagtgctcttcggcaaatttgcggtaaatggggaagaggtccatgcctttgtaagtagccttatcgaaccaagtaaagtggttgatgcccttgacgttgaccttgatatcctggcgggcaacatctttcaggcccagttcctcatccagaatgtgggtcagcagcgtctgggtgccgaacacctcgtggcagcagccgaacgccttgatcttggggaacacatgatacagggtacgcacgcagagggtcatcgggttggtgtagttgatgacccaggcattgggactgtaatcgcggatggcttcagcgatggtgacatacatggggatggtgcgcatggcgcgcatgaaaccgcctgcacctacggtatcgcccaccgactgatagatgccgtaagcttccggcgcgtggacgtcgctttccatctcgtcaaaggtgccgggcaggatggagatgacgacaaaatccgcgccggtcagggcctgctgcagcgtatccgccacagtatacttccagtgtgaaaccgcatccgggtgggcagagatcttgttgccgatgatctcgttgtgctcggctgcttcgtggtcgatatcatacagcgccacggtgccttccatctgggcatccgcggcaaggtccatcatgaacccccacgcccacccacgggaaccaccgccgatgtaggcaactttcaagtcttttacgcggttgtcttcataatacatggattgaaacctccgtttgttttggtccgtaacattgatgcgtgcaaaaccgcaaaatttgctttttttgccgtattcttgctatcagtatacaccaaataaaggaaaatgtcacgaaaaaagtgaaaaaaattgaagaaaaatgggcaaaaagtgaagagaaaattaggaattagtaatgagcaattagaaattaacagaaaggcagagcccggtacaatcgcaccgggccctgtctctatatcaattcctaattgctaatttctcatttctaattgagataactcctaactcctccctcctaactcctaacttatccttccactttcacattctcgcaatcgctctccgcgtttccatccgcgtccagcgtgatatgtacaaaatgctccggcttatcgtaatctttcgtttcgccgtcatcagtgtaatactcataggcggcaccatcgggggcatgggcgaacaggcgaagatccgcaaaattcacgcttgccacattttgaatactatcgccgcccttggcgatgggcaggatatgccccttgcgcacaaagaacaccacttcgtccagctccaccgggatgtaatgatgaccagcgggcagaacggtggtttccatgcggtcgttctcactgcactttacccgcacctgcagcatctcttccggcaggtagacataccggccgcgggcgttctgctcatagacgggggcaatcagcaggctttcaccgatcattacctcgtcctctacctggcgtgcaaaggcgtcattggggaaagcaaaggccagcggcatgcagtacatgccatcgcgcagggcagctttcatgtactcactataaatgtaaggcagcagcaggtagcgcagctgcagaataccggcaaaggccgccttattcttaaagcggtagggctcctgtttgcgggtaccggcggcggagtggttgcgcagcaggggagagaagatgcccacgccgtaccagcgcagcacaaggtcctcggtggtgttgctgccaaagccgccaatgtcggggccttcgtacaggaaaccgcacatattcagggagggcatcatgtgcaggctgagcagaatgtggctccaccaggactggttatcgccggtccagataccgccataccggtgcataccgatgcaggccgagcgggagtacattaaaatgcgcttatccggctccagctgctcaaaggcttcacccgcagcacgggtcatgttgtagccgaagatattatgcactttatcgtgccgcatgcggccctgtttggtgttgtgatagaacagcttgtagtcattttcgttgttggaaagcccggccacaagattcttgaacgcaaaaaagctggaaatatccaggttctgggtgcggtactcgtcaattttggcaaaggtctttttcagcgtttcttcagagtagaagatggcaggctcgttcatatcgttccagaacccctcaatgccctggttcagcaggaacttgtacttgctgccaaaccaggcgcgggcttcggggttgagcatatcagggaaatgcacccggcccggccacacaccggccacaaagggggtgccatcctgattggtgcagaagtaaccgttcttcacgccctcttcgtatacatcgtacccgtcctcaattttaacacccgcatcaatgatgggcacaaggcggatgccctgggctttcatctcggcggcaaaatctgcaaaatgggggaagcgctgctcgtccaccgtaaagtccttgtagcgctccatgtagtcaatatccagcaccacggcgtccagcggcatgttgttggtgcggtagttggccacaacctcgcgcacttcgtcctcgttcatgtagctccagcggctctgggtggcaccaaaggcccatttgggcgggatgtagctgcgccctaccagctggcggaactggtgcacaatatcggtcgggctttcaccctcaatgatgtaaagatcgtaattttcttcggccactgtcacccgcagggtgtccagatcggtgtagccgcagtcaaaggtgaccttgccgggatagtcgataaaaaagccaaaagtggctttgccggacacgatcatgaagttgtaagcgccgtacagtgaggatttgttttcggtatggttggggtcatcgctgcatttgctctcatacacccagccgcgcttgttgatgccgcggatgttttcacccaggccatacaggatatcctgcgggtccatggcataagagaagccgtccggttccctggtgagatatggaatcgtttccatcgcgggtacaaaagaacccaccacgctttcggtatcaaatgggtggccgtattgctttttgtaaatcaaggcagtttcctcccgaataaatttgctttggggctgatttaactatagcaaattgcgggcagaaagggaagagggaagtttagttaggagttaggagggagaagttaggagttttgcggcaccacaaggttggtgctggacgaattaggaattagcaatgagcaattaagcggtggatcgcgacgcggagcgccgctcggagatattaggtttgttacgattcaatacacgggtagtagaaagggaaaacggtgcccacttataacaagagctaaaacccagtgcctacctattttatatattatatatccttatgctcaaattctgcttcgatttggagctgcacaaacaggagatcttgggcatcggtggtctgtctgactgtggcatggtgtttcgtcttgcaaacaagaatgcgcgagaaaacgcatgaacacaggaatatagtgcttaatagatacagtataatctacttaatgtgaaggaccaatctattttatttaaggaaggcattcggtaagtggctggcgtgactcgcattgctgaacaaaatacagtgtttgaatgagttctaataggctgttacttaccctactctatatttcgctaaacccacctttagcgaaattggtaatggggcacatttattccctctccattttacagctaacaattcagcaaagcccgcccatgacgatgcccgcatcgtgccgcacgatcgatatactttgcagctgcttttcaaataacatcaaacccaatatttactgagcggcgcttctgcgccgcaggccaccataatgattcattattctttattacttaggcaacaccgcacaattcccgccttacggcttaagcaccgcttcggcggctgc

SEQ ID NO: 1146 - DNA, 7708 bp, unidentified
  source 1..7708: mol_type = unassigned DNA
tcagcccacaaacacgtatttttccagccggtccatggcctcccgcaccagggaatggggcagggcggcgttgatgcggatgcagtcgccgtcgccgaagcccgcgccgctctgccagatgacgccatgctccacgccccggcggcggagatcatccggcgtgatgccgtggctgcggcaccaggccccgcagttgacgaacagcatatacgtcccctggggcagcatcatggtgacgccgggatagcggctttgcaggaagtcacggatataccgcaggttccggtccagcacggcgcacagctggtccacccacgccatgccctcgtcgctgtaggccccggtgagggcgtgcatggacagcacgttgcagtcgttgtagccggacaggtttccctgccgctggacccggcagcgaagccggtcattataaataatgtggtaagagccgatgagccccgccaggctgaaggtcttggtgggggcatagaaggccacggtgcgctcccgggcgtcccgggagacggactgagtggggatgtgggtgtatcccggcataatgagatcggaccagatctcatcggaaatgacggtgcagtcgttggcggtgtacacctccatggccttttccagctcccagcgctcccatacccggccgcagggattgtgaggggagcacaggatggccacatggatgtcgctttccttcagcttccggtccatgtccgcatagtccatgcgccagatgccctccgcgtcctgcgtcaggggcgtgtggatgatgggacggcccagccgctccagggtgtgggtgaagcccacataggtggggctgtggaccagaatcggctcgccggggcaggtcagggcctggaccacggagctgacgccgcccagaacgccgttttcatagccgatgtgctgccgctccaggccggtgacgccgtggcgcacctgctgccagcggatgatgctgtcaaagtaggcgccgctcagctgaaaatacccgaaattcgggtggtccagccgggcccggatggcctccagcaccggcggcgcggtggggaagctcatgtccgccacccacatggggatccgggaaaagccctccttgggctccaccccgtcataggggatcatgtccagggccagggcgtcccggccccgccggtccagaatggtatcgaaatcgtactgcatggttatcctccgttctccgttccggacaggtggaacacccgccgggtattttccagtatggccgcctccgcagtttccggcggcagatgcttcagccgggcgatctcctccacgatgcgcggcagcagcagggaggagttgcgcacccggctcagggattttttgctgcccgtccagggtacgtccggcagcacataggggctgtcggtctccaccagcagccggtccaggggagcgcgggccaccgcgtcccgcagggcctccgactcccggcgcagcagcgccccgccgatgcccagacagaaccccaggtccagataggcccgggccgtgtcccagtccccctggaagcagtggaccaccccgccgggcagctgacgccgcctgcgccgcagcatgaccagggcgtcctggtccgccatgcggatgtgcagcaccaggggcagtcccagccgccgggccaggcccagctgataccggaaccacagcagctgggtcagccggtgcttccggggcaggtgatagtccagcccggtctcgccgatggccgctacgccgggctcccgggcccagacctccagctgcctgcgctgccgccaaggggcctgatgggtccgggtggggtgcacgcccaccgccaggcggatgaagtccggatgctgccggtacagggcagcggttcggcggttggactcaaagtcgatggcgggctcgatggaaaggacaacgccgctctcccgcagacggttcagcaggtcctcccgctgtccctcccgggccgtcagctcgccggtgagatagcggaaggcaccgtcgaagcgcttgtggctgtagtgggcgtggctttcgatgatcatgtgcgccggtcctcctctccggggttacgcttcttccgactcctccggctgtgcaggggcctcccaggggaccatggtggccacacaccggttgatggtgactccctgctgatagaatttggcctcgtagtccgtcataacccccacggggccgtcggcgtggaggtcccgggtgacctgggacagccggaagccgaattgggggatctcctccagggaccactcgaacagcttgtcgttgtcgcttttgaagtgaatctcgccgcccatgggcagcacccggcggtataattgcaggaaattgccgtgggtcagacggcgctttttctggttacttctgggccaggggtcgcagaaattgatgtagatgcggtccacctcgccgggggcgaaaaactccggcaggcaggcggcgtcgccgtccacaaagaacacgttgtgcagccccgcgtcccgggcccgctccatggccaccaccattgcgtcggggaccttttccacggcgatcagcagcacgtccggctcggcggcggcggtctccgcggtgaagcggcccttgccgcagcccagctccacccgcagctcccgggcctccggcagcagctcccgccagcggccccgcagggctcgggggtcctcaatcagcagggcgccgcaggcttccatccggggcaccagattctttttctttctcatgcgcatgggtcatttcctcctgtgcggccatggccgcgaataaaataccaactctatatataccacaagatacacggttctgtaaacgaaaaaaatgctccatttggtgccggggacggttttgtgaccggattatgaacatgtcatattgaaaaatgcgcaaagaattttcatttcttttgtggaatatcctgaaaaagagaaaggcgggaaacaagggcttgataatttttagacgagggactataatacagactgtatgaagatcatgcacaagatgggaccgctatgggcggcatcccgtcgcgcgcccgccgctgcggcgggtgatcgaagcaaggaggaacgatcatgacgaatgttctgttggaaaagaagggccacattgccgttgccaccatcaaccggcccaaggccctcaatgccctgaactcccaggtgctggaggacatcgaccagctggtggaacaggtgaaggcggacgacgagatccgtgccctggtcatcaccggcagcggcgagaaggctttcgtggccggcgccgacatcggcgagatgagcaccctgactaaggccgagggcgaggccttcggcaagaagggcaacgacgtgttccgcaagctggagacgctgcccatccccaccatcgccgcagtcaacggctttgccctgggcggcggctgtgagctgtccatgagctgcgacatccgcctgtgcgccgaaaccgccgtgttcggccagccggaagcgggtctgggcatcaccccgggcttcggcggcacccagcgtctggcccgtctggtgggtatgggcatggccaagcagctgatctataccgccaagaacatcaaggccgacgaggccctgcgcatcggcctggtgaacgccgtgtatcccctggaggagctgatgcccgcagccgagaagatggccgagaccatcgccaagaacgcccccatcgccgtccgcgcctgcaagaaggccatcaacgacggtatgcaggtggatatcgaccgggccgtggccatcgaggagggcctgttcggcagctgcttcgagactgccgaccagaaggagggcatgggtgccttcctggaaaagcgcaagcacgagccctatcagaacaagtaaccccatttggttaattaacaggctccttaccgggcctgatgattaaaatcgctacttaaataaaaatttatttaggaggaacaatcatgaaagtcgcaatctttggtgcaggtactatgggcagcggtatcgctcaggttttcgcagcgaagggccacaccgctctgatgtatgcttccagcgttcccagcgctcagcgtcataaggacaagctggccgcctctctgaacaagaaggtcgcccgcggcaagatgactcaggaagctgctgatgatatcatgagccgcgtcctggtggaggagttcgaggccgccgccgatgccgacctggtcatcgagtgcgttgctgagaatatggccaccaagaaggagctgctgggccgcctggatgccatctgcaaggaagatgccatcttcgcttccaacacttcctctctgtccatcaccgagatgggccagggcctgaagcatcagctcatcggcatgcacttcttcaaccccgtgcccgccatgaagctggtggaagtcattgccggcggcaacacccccgccgagctggttgagaagatcaaggaactgtccgtcgagatcggcaagacccccgtggtggtcaacgaggcccccggctttgtggtcaacaagatcctgatcccctattgcaacgagggcgtttgcgttctgcaggagggcgttgcctctgcggaagatatcgatattgctatgcagctgggctgcaatcaccccatgggccccctgcacctgggcgatctgatcggctgggacatcgtgctgaacatcatggacgtgctgtataacgagacccacgatagcaagtatcgcgcaaacgtgctgatccggaagatggttcgtgccggcaagttgggcatcaagtccggcgagggcttcttcaactacaaaaagtaaatctgtaaaggagaaaagagtatggatttccatctgacgaaggaacagctgctcgttcgcaagatgtaccgcgaattcgcagagaacgaagtaaagcctctggccgctgagatcgacgaagaagagcgtttccccatggaaaccgtcgagaagatggcgaagttgggcatgatgggtatttatttccccaaggagtacggcggcgccggcggcgacgtcctgtcctatgccatgtgcgtggaagagctggccaaggtttgcggcaccactgccgttatcgtctctgctcatacctccctgtgcgccgcccccatttttgagaacggcaccgaggagcagaagatgaagtatctgcctgacctgtgctccggccgcaagatcggcgctttcggtctgaccgagcccggcgccggcaccgacgcccagggtcagcagaccaccgccgtgctggatgagtccggcgagaactacatcctcaacggttccaagtgcttcatcaccaacggcaacgtggccgacaccttcgtgatcatcgccgtcaccggcaagaccaccgacaagcgcggccgcaccatgaaggagatctccgccttcattgtcgagaagaccgacaagggcttctcccagggcaagcacgagaagaagatgggcattcgcggcagctctacctgcgacctgatcttcgaggactgcgtgatccccaaggatcgtatgctgggcaagaagggcgagggcttcaagatcgccatgaagactctggacggcggccgtatcggtatcgcttctcaggctctgggcctgggcgagggcgccgttgaggaagccatcaagtataccaaggagcgcgtccagttcggcaagcgcatctcccagttccagaacacccagttccagctggctgatatgcacacccgcatgcaggccgctcagtacgtggtgtacgctgctgccatgaagaagcagaaccatgagccctattccatggatgccgctatggccaagctgtttgctgccgaggccgcttccgatgtgacccgccgcgccgtgcagctgttcggcggctatggctacacccgtgagtatcccgtggagcgcatgatgcgcgacgccaagatcaccgagatctacgagggcacttccgaggtccagcgcatggtcatctccagccacctgggcgttaagtaattgaggaggtaaaaggtaaaatgaaaattcttgttactgtgaagcaggttcccgatacctccggtaaggtggcagtgaaccccgacggcaccctggatcgtgcctccatgcagaccatcatcaaccccgacgacctgaacgccgtggaagccgccctgtccctgaaggaccagctgggctgcaaggtcatcgcgttcaccatgggcccccctcccgcagaaggtatgctgcgtgagctgatggccatgggcgtggacgagggcgtcctgattaccgcccgcgagttcggcggctccgacacctacgccacctcccagatcatcgccgccggtatcgacacctacggcgtggaagaggacgacatcatcctggccggccgtcaggccatcgacggcgataccgcccaggttggcccccagatcgccgagaagctgcacctgccccaggtgacctacgctggcgagatcaccaaggacggcaataccctgaccgtcaagcgcatgctggaggacggctatatgaccgtcaaggtcaagaccccctgcatgatcacctgcatcaaggagctgaatcagccccgttacctgtccgtgggcggcgctttcgaagcctacagcaagcccctggtcaccatgacctatgagactctgaaggatcatcccctgatcgacaagagcaccatcggcctggcgggttctcccaccaacattctgacctcctttacgcctccccagaagggcgccggcatgatgctcgagggcgccggtaaggagactaccgacaagctggccggcatcctggccgccaagcacatcatctgaggaaggagataagaaaatggcttttaatagtgctgataccgctgccttcaaaaacgtatgggttttctgcgagcagcgtcagggcgtgatgatgcccaccacctttgaactgatctccgagggccggaagctggccgacgagctgggcgttgagctgtgcggcattctgctgggcgacaacgtggacggcatcgccgctgagctgggcgagtacggcgcggacaaggtttatgtgtacaactcccccctgctgaaggacttcaccaccgacgcctataccaaggtgatcgtggaggccgttgaggagatcaagcccgaggtgctactgttcggcgcctccaacatcggccgtgatctggctccccgctgcgccgcccgtctgcacaccggtctgtgcgccgactgcacccacctggacatcgacctgcccaactataagaacttcctaaaggaagcctccactctgcccgaggaccgcatcaacaagctgggcaccgtgatgatcaaccgggagccccatcccgtggatcgcgacctgaagatgacccgtcccgctttcggcggtcacctgatggcctccatcatctgcccccgcttccgtcccgccatggccaccgttcgtcccggcgttatgaagaagcgcctgtgcaagaagaacgtggagatcctgcaccccgccttcgctctggaggcttccgacatccacaccgaggtggtggagaccgtgaaggccgccaagaagctggtggacctgatcggtgcggacttcatcgtgtccgtgggccgcggcatttccaaggacgtggaaggcggcatcaagctggccgaggagctggctgaggttctgggcggcgtcgtgggttcctcccgcgcctgcgtggacgccggctggatc

SEQ ID NO: 1147 - DNA, 6175 bp, unidentified
  source 1..6175: mol_type = unassigned DNA
ctatatgagtatcttttttccgaagaagaaaggagaaaggcatgctttatccaaacagaatgcgatgaaaatgctaccgtacagagtgatgactgtggcggtacagagaaagcatatccctgtcgggtcgaacgaaaagaaaggcagaaagagtttggacagtgcggtaaagacgggggagaaaagaagaataggcaatgtgttctttccgatgaacagtgaagcttgcttcacagtatggggaagatgtttgtagatgtacagcgaaaggctgatgaccaatccggtaattaatatgcctcctaaagtgcctctgttcagattctccggctggctgcacagaaaaaccagagggataatggcaagaaaagaagcggggaaacaagataggaacggacgttttcccagatggatagcagtgcctgccatgaaatagaaagcattggcaaatgtcagcaaatgaaagatgtaagagaaaagtaaaaggagactgcttgttaccagtaggcggataaatggagtcgaactgagataagtatgcacgaaataataggtggtgccacataatatgaatgtgtgcagataccagtaaggcccaataggatcaagcaatactttgccgagcagaactgaggcactgatttcttttatcccgtcccaaacgggaaatagcatagacatgcaggcataactgatttccataatggtgtatggaatgaatatccatgccatcgctttcagaaaaatttccggctttttatgcacgttaatcagataacccgaaatcaacaggaaggcgggcatatggaaagtatatacgatacttttggcatacggatacttacttcctatatggctcaggtgaaagatgatcatgagtatgataaacaggcatttcagatagtccagttcatggatacggttcctcatgattgtatcagataaaagcatgaggtacagaaaaaattgcgcagatgcggtatcgaaccgatgagacgtagcaatttacgcggtttaaggtgaaatttttgttcgtaatgcggattgataaaccagaattgtttgtgaaaaatccgatagtgggaagtgcagagaagtttctcgaatagttcgatacttgtccggcatttccgtatgtcgagaagttcatcgatgcgtgcctggctttcgccaaagtggtgtaataaactgctgtagatgcctgcgggcaataaatgaatgaaaggcaggcgtgaaacatatttgttccggcaaatctgctgatgccctccaaaaggcatttgccagggagggaagctgataaagagtagtccaccgggagtgaggaagcgtttgatatgttctaaaaggcggtatttttcggagatatgctctataacatcgtgaatcagtatgatgtcgaatgcttcttccaattgtatgatttgaaaaatatccgaggctatgaaagtggcgggcagtctttcttcctggaagaactggcgggcttgccggatgcggttttcggataaatcaatgcctgtaacccggcagccgatgcgggcaaagggtaccagattgccaccttcgccacaaccgatttcaagaatccggctttggggagtgacagaagtgaatcggtgaatgtagggaaggaaatgaagttcactggtcgttgccagttcctgaaagtaagtctttctgttttcgtgtctttgctgcatacgtttggttgtgttttagattcattttcaaagaaaatccttgaaagaaataaagatataaataataattgtatattgagtgaaaagtaactttttttttagttaatatttgcgatttctatatccggcttcatctgattaatggttgacgaatcttgttttggatacagagttagggtgtataaaaagcaaacggacaccggaactgataaagttccggtgtccgctgcattttctatctatacgtctttacttgcgatagctttccaactcttccgccttgaacttacggatgaagttgaaatgcttctctatttcagactcggcatagtttacgtacaccagcgccgacttggcaaacatttcgggagctgttgtcgcatcctgaatcagcaagtgagacattacgcacacggcagccatttcgtaaagacggcgagccacgaagtccagcaattcctgattgccgctttccttaacggcgttggtgcaggcttcgaacttattcgtcatttcttttacgcggtccaacagcggttgcatttcttcgctgcacggaatcagctcatagtcgcgcagggtggcggcataagaaccgttggtgacgtagcggatggcggctaccgtctgcaactgtgtggtaccttcgtagatgctggtgatacgtgcatcgcgataaatgcgctgacaggcatattccagcatgaagccggaaccgccgtgaatctggatactgtcgtaagcattctggttggcgtattcggagttcataccttttgccagcggtgtgaaggaatcggccagtttggcatatttcttctgttcctgacgttcttccggagtcagtttgcgttcgcgggcgatgtcgtccagtgccttgtagatgtctacgtagcgtgaagtctggtacagcagggcacggccggcatccagtttggctttcatgatagccagcatatcgtacacggcggggaactcgatgatggctttgccgaactgtttgcggtctttggcataagccagcccttcgttataggcagcctgtgacagacctacggactgagcggcgatacccagacgggcgccgttcatcagcgccattacgtatttaatcaaaccgagcttgcggtcaccgcaaagttcgcacttcgcattcttgtagaccagttcgcaagtgggcgaaccgtggatacccagcttgttttcgatgcggcgcacgtttacaccgccgtcacgcttgtcgtagatgaacatggacagaccgcggccgtcctttgttccctcttccgagcgtgccagcacgaggtgcaggtcggcatcgccgttcgtgatgaaacgcttcacgccgttcaggcgccagcagttgttggcttcatcgtaagtggctttcagcatcacgctctgcaggtcggaaccggcatcgggttcggtcaggtccatggacatggtttcaccggcgcagatgcggggaatgaaacggctgtgctggtcttcgttaccgaactcgtaaagagtctcgatacagtcttgcaaagaccagatgttgccaaagccagcatcggcggcagctacgatttccgcgcacatggtgtacggggtaatcgggaagttcagtccgccgaaacggcgcggcatggtcataccgttcagtccggcctttaccatggcgtcgaggttctgtttggtgccgctggcatattccacacggccgttggcgcaatgagggccttcttcgtccacaccttcggcattgggcgcgataatctcacccgtaatctcaccggtgatttcgagcaccttgtcgtaggagtcgattgcatccgcataatcctgcggtgcataatcgaacttgtctttatcttcgtagccgcgttctttcagttcgcagatacgctgcatcatcggattgttcaagtgatacttgagttccggaatatctgtataaaaattagccatattgtttttccctttaggagttagcggagttaactccttatttactattctgtttgtaatacttaatcatcttcggaataacctcttctaccgtaccgttgataacgtagtcggcaatggcattgataggagcgttctcgtcattgttcacggagatgatgatgccgctctcctgcattccggcaatgtgctggatttgtcctgagatgccgcaggcgatatagagtttcggacggacggttacacccgtctgacctatctgacggtcgtggtcggcatagcccgcatcgacggcggcgcggctggcgcctacttcggcgtgaagctccttggcaaggtcgaacagcatgtcgaagttctcgcggctgcccatgccgtaaccgccggcaatgacgatgggagccccctttaaattgtgtttcgccttttccacgtggcggtcgataaccttcactacatagtccgtttcgggaacgtacttggcaacgtcgtggcggattacttcacccttgtagtcggcatccagaatctctttcttcatcacgccctcgcgcacggtcgccatttgcggacggtgttcggggttcacaatcgttgccacgatgttgccgccgaatgcgggacggatttggtacaacagattttcgtaggtcttgccctctttcttatcctcatggttgccgatttcgagtgaggtacagtcggcggtcagtccgctggtcagtgcggaagatacgcgcgggccgaggtcgcggccgataacggttgcacccatcaggcagatttgcggctgttcttccttgaacaggttgatgaggacggaagagtggggaagggaagtgtatgggaacaggcccggagcgtcgaatacgtgcagtttgtcgacgccgaaaggcaatacctgcttttcaatgcctgccagattgctgccggcagcaactgcttccagttggcagcccaactgattagccaatttacgacctttggtcaggagttcgagactgacatcggctaccgtagtgccttctatctccaaatatacaaatacgttattcataatcttatcctatcgtgtggttagctaacagttcaacaatcaaatcttctacatcccggtcgctgcccgtgagcgttttgctttctttggcctggaatgaaatattctgaatggttttcaccttggtgggcgagccgctcagaccgcattgtgcgaggtcgccgttgacgtcggccacactccattccgtgatgttcagataagggtatttctcgtaaagggctgcatacggcagttcggcgccttctttttcaatggcggctttctcctgcgcaccgagggcgcgtttgtatttctgcaccagtttggcattgcgcggacggcagggagcggcgcttccgttaacggtgataacgatgggcaacggaccttccacagtctccacaccgccgtcgatatggcgttttacggtaatctttccggctgctttgtccacattcagaatctcttccgcataagtaacctgcgtcaatcccaacttctcagccacttgcgggcctacctgtgccgtatcgccgtcgatggcctggcggccgccgatgatgatgtcataatcgcctatcttcctgatggcggtggcaagggcgtaggaagtggccagcgtatcggctccggcaaaagcgcggtcggtcagcagatagccgttgtcggcgccgcggtaaagtccttcacggataacttcggctgcgcgtcccggtcccatagtcaggatagttacggtggagcccggatgtgcatctttcagccggagagcttgctcaagggcattcaggtcttcggggttgaagatggcggggagtgccgcgcggttaatggttccgtcggctttcatggcatctttcccaacgttgcgtgtgtcgggaacttgttttgccagtacaacgattttcaaactcatgttattaattattagtattagtattccatatgtcagtaccgggaataggagtagtagagtcctgctactgaaattgtccggttaactatcagcttgcaaatttacgcaaagagttgggtttgacaagaaaacaaggtaaaaaatgcacatccggggagattttgagcaaaaacgcaaaccgtaaaaagggtaacgcaaaccgtaatccgtctaccttccgaatgttctctccgttgtatttttgcagcgtcggacatatcggtaaatcatttttatgctatccgtcgtttttaaataaaccatctatttataaataaagctatgtatatagaaaagattaacgggcctgccgacgtgaagcggctttcggcaggcgaactggaaacattgagtgaagaagtgcgcggcgtattgctgaagaagctgagtgagcacggcggtcatgtaggcccgaatctgggtatggtagaggctaccgttgccttgcactatgtgttcaattcgccggcagacaagattgtctacgacgtttcccaccaaagttatgcacacaaaatactc

SEQ ID NO: 1148 - DNA, 27850 bp, unidentified
  source 1..27850: mol_type = unassigned DNA
tctgatcccggaaacattcgtccggcgctcaggccggtgcggcaaacgcatcggccgcaacggccgttccgcctgcgccgcacgccgcggagcaatcttttcggcggaaatttcccgaatctcccggaaaatgctatttttgcggctgacaagagcacgttatgacagaaaagctgattcggaaagtctggattgcggtgtccgcggccgccctctggggatgcgggggcgcctcctcctataccgccgtggacggcgtgatgctcggcacaacgctgcatatcacggccgacgtgcagggcgtctccccgcaggaactctacgccgccgtgatggaactcgaccgcgaagccaaggcgtctatgtcgatcttcgatccgagctcgctgctgagccggctcaaccgcaacgagacggacagcgtagaccgccatatcgccttcaacctgcatctggccgacagtatcggcgccctgagcggcggccgctacgacgtgacggtcaaaccgctggtcgaagcgtgggggtttgccggcaggcaggccgaacggcatcccgacgtcgattcgatcctcgcattcgtcggccgcgaaaaggtccgtgtcgaggagggccggctggtgaaggccgatccccgcgtacagctcgacttcaattcgatcgccaaaggctacacggtcgatctgctcgcccggctggtcgaatcgttcggcgcccgcaattacatcgtcgacatcggcggcgaagtccgctgcaaaggggtcaaccggcagggcggtccgtggcgcatcggcatcgaaaccccgttcgacggcaacatgtccgacggcgaatacgtgcagaaacgcatccgcctgaccgacggcggtctggccacttcgggcaactaccgccgcttctacctcgatgccgacggcaacaaggtggcccacaccatcgacccgcgtacggggcgcagcgccgtgtcgcgtctgctctccgtgaccgtcgccgcgccgacctgcgccgaagccgacgcgctgggaaccatgtttctggccatgggggccgacgatgcgctgaaggccgtcaggacgatgccggacgtgaaggcctatttcatcctcgccgacgggaccgacggctacgaagagtatatttcacccgccatggaggcgatgatcatgcaataacgatccctatgaaaagcgctgtttttctctacaacacccaatccgggaaatgcaaaatcgaacgctgcaccgaagccgtctgcacggtattccgggcttacggctacgatatcaaaccgcagctgatcgacttctgcgccaatccgttcgacggcaacgaacagatcgacctgatggtcgtggccggcggcgacggcacggtcaactacgtggtcaacgccatgaaaaacaaggggctggacatcccgctcggagtgattcccgccggtacggccaacgacttcgcgggtgcgctgggcatgtcgcaccagccgctcgaagcggcgcggcagatcgcctccggcgcggtggaccgcgtggactgcggatgcgtcaacggactctatttcgtcaatatcttcagcttcggcatcttcacgaccacctcgcagcgcacgcccgaccagcgcaagcacaagatcggcaaactggcctatctgatcgagggcgtcaaggagctgcgcgcgatgcacgccgtgccgctcaaagtggtggccgacggacaggctttcgatttcaactcgctgatggtgctcgtcttcaacggcgagacggccggcggattccgcctcgcgcgccgttcgtcgatcaaggacggtctgttcgactgcatcatgctcgaaaagaagaacttcctccgttcgacgctggccatgggccgctatctgctgcggggcaatccgaagatcgtccgccaccttcaggtgcgttcgctcgacatcgtatcgacggtcaacgaaccgacggacgtcgacgggcagaaaggggccgaattcccgctgcatatcgagtgcatcgccggaggtctccgcatcatgtgcccccgcggagagtagcgccgtttcaggcgtttgaaaggcgtttcaagacggtcgtttccgccgccgccggcctgcgtacttcgctatttttcctccggcctattgcaatttcggacgaaaattgttacatttgtccgaaaaaccacgacgatatggcggataatatcaaagcgacacggacgacgcgggaaggaggacgtgagaatttgcggaaagtttcgatctcacgcatcaaaaaggagatgagcgacgtcttctatctgtcggacgatctggtaatcaccacactcgacgcgcagaacaacacgacgtccgactacccggcttcgatcgacggtttctcggccatcatcatgatgacgggcgaagccaccgtgtcgatcgacatgcagaactacaacgtcaagcccaacaccatcgtctttttcaatccagacagcatcatccgcacggtgaaatgttcgtcgaacgccgcggcttattttctggcgttctccaaatcgttcgtcaatgagatccagatcgacctctcgacgtcgctgccggtctacatgcgcttcggcaaggctcccgtactggaggtcacgccgcaggacgtggaccagatacgccagctcttccagctcatcaaaaccatgctgcgcagcgacaaggagcgttaccgccacgaaatcatccggacgcttttcaccacggcgttctacatcatcaccgagatcaaccagcgcgagcagcccggcgagatcaaacaaggccgctgcgaagtgctcttcgatgaattcatgtcgctgctccaacagtacaacaaacgcgaacgcaacgtcagcttctacgccaagcagctcaatatcacgccgaaatacctctcgtccgtggtcaaggaggtgagcggcaaaaccgccgcgcgctggatcgacgaatcggtgattctggaagccaaggcgctgctcaaatactccggcatgagtattcaggagatcgcctaccacctcaacttttcgacccagtcgttcttcggcaaatacttcaaacagcacaccggcaccagcccctcgcgctacaaacgcaaaggctgagccgcagatacggcacgaaaccctctcccggagagggttttttgttgtctccatccgaaaagtacgggggtgcagcccggtattcgtcgatataacatgaatttcgagcggccgtttctcagctgttcgacgcttattttgtaaaccatagcgtaaaccggaaaaacatgaaaatccccaaggcgaccgtcacggcggtcctttacaaatcgaagaccctcgccagcggcgaacaccccgtcatgataagggtctgctacaacagcaaacgccgatacaaaagcacgggactctcctgtccggcgaaatggtggaacgccgcgaagcaggaggtgcgcgaacggcatccgctggccccgaacatgaacgccatcatcggttccgaactgacggcgctgaaaaacaaagtgctggatttcgagcggcagggggtgccctactccgtgcagcgcatattcgaagcctcggtgcgtaaacctccgtcccggaaaaccctgtacgaccttttcgaagagcgtatcgcttatttcagggacaccctccagaaacacaacacggccaccggctaccagacgctgctccatatcgtcgaacggttctcgcagcaccggaccgtcgagctgttcgacgtggacggcgcatggctcggcgagttcgaggagtacctccatgcgcattatgccgatacgagcatcaaacggtttttcagcgccctgaaagcgctgatgaactacgcctgccagaacggactgctggacgccaatccattcgaccgcttccgtctgagccgcaggctcgacgtgcggaccgccaaacgggcgctcgaaaccgacgaattcgacagcctgatccgttactacctcgatacatattattataagacccggaagagacccgatccccggacgatgaaaagacgctgctggcgcgcgccatgccacggatgccggggcgaggagcggcaggcgtcgtacgacgccgagcagttcgcgctttcgatgttcatctgctcctatatttttcaggggctggcgctggtcgatctggcccgcctgaggtggaaagacctcgtatgcgtggagattccggaccgggagaagtacgaccgggattgtgcggcctacggcccccggtatgccgaagcgcataaggagacggtcgctttttatgaaatcaatttcgttcgcgccaaaaccctgcatccgatccgcattctggtcgaacagcgggtggcgtggccctatatgaagccgttcgcccgcacggcgaagggcggcgccggagacgacttcgtttttccgatctacttcgacgacgacccccaacgccggttcgaacgcataacctatgccaacaacgtgataaaccaagggttgcagcgtgcggcgaagcgcatcggcctgtcgcggacactcaccttctattcggcccgtcacacctatgcgtcacgtctttatcacgccgacgtgccgctgcccctgatcgcccagaacatggggcgcaacccggtggaaatcgaaacctacctcaaggagttcgacacggacagaatcatcagcgccaacaagcgggtctggcaaattcccgatccagcccgcaaagacccgaaaaccggcgccggtttgtaaacctccatgtaaaccgagccgttatgcaagattgtaactccataaatatcagcacataactcaatctgcgctttgttcttaaccgagaacaatgttagccggtgtcagttgtaaagactactacgacgacatcgacgacctgaagggtcagatcaacgacttgaagggtcaagtcgagttgaaggccgacgcttcagccctcaaagctgttaccgacaaattaaacgggatagatttctcgtctttcgttaccaacagcggtctccagacagagctcgacaaaaggctggcagactatgccaagaagtcggatctgaaagattggctgactaacgatgaggtgttgaaacttattcaggcacagggatatcagaccaaggctgacgttcagaagctgatcgacgaaacgaccaagaatcagctgactgccgacgatgtcaagaagattttcgagacgatgatcgcttcggacgagaccatgggtaagctgcaggccgaaatgcagaagatcatccagcaggctctggtcgacggcaagtatgttaccgagcagcagatgaaggacttcgtcgagggtaaaggttacatcaccggtgccgatcagctgtcggcgactcagatcaaccagatcctcacggctgtcgcaaattccgtatcctcggagacggctacggtcaccgatgccatcaagaaggtcctcggcgacaacttcgcttcttacatggctgagtacatgaatgacgagacggtcaaagccgaaatgggcaagaccatcaccgatacgatcctcaaggagctgaccgatgccaacgtgactctgaaagaggctatcgaggcgatgatcgaagagggtgtaaacagccaactgttcaaccccgacggcagcgcaatctacctgaaagaagctgatctgaaggatcgtttcgataattacgacacgcagctccgcaatctctggagcgctatcgcagacctcgctggccgcattcagtcgctggtttatgttccgacttcgcttgaggaggtatcgaacaatgtcatttccatcgagggacttccctatatcgcgatggttgacggcgaaggtgaggactacaaattctatctgggcagcggcgagggcggcaacgaggccgcgatcgaagctactttcatggtttcgcctgcggctctggcagttaagatgaccaaggagaacgtatcgttcgtaacggaagagatcaagacgcgcagcgctgcgtcgttcgaggttgtagacgtgatcgatcaggacgtggtgaccggtaagtttaccgttgtcgccaagactcagtacgagtacggaaacggcaaaacgctggccattgcgctgaatgtgaaactcgcaggcaccggtgtcgccggagctacgcccgaagatgccatttcgggcgaggatttgggcagcgatttcaccagtgcctttatcggtacgcagtatagtgcaggcggcgcgatcaacgccgatctggttgccggccgtatgaaagaggacggaaacctcgaactggtaattgacaacgatacccagttcccggaattcgagggtgacggcggtctgaagtataacgacgaggaaaccgtcgttgagttcttccatgatgtgaagatttactacatgaaagacggcaaaccgcaggagctggctgagatctggggcgaggatgttcccgttctcaagaccgttgttcctgaagacgacgccgtagcgacggttgatcccgaaactaacaaggtcagctatacgcttacggcaaccacggcggcgatcaaaaagggcaagggtgttccggctctgatcgacgacgtgattacctcggaacccttctcgttcgacctcgtatcgggcgaatacacctgccgcgtggttaagaacgccaaatcgcagttcaccattatcaagaacaacaccgacgtcatcgtttccgtgccgcagacggtaacgtggaactatgcaacggttagcgccggcgacgattacgaggctgtcgattacctgctgaatcccgatcccacgaagccgcagatcggccatgtgatttacaacgcactgaaagatggatacttcgaagatatccagatcttcgacggtgagaccgaaatgaccgacgagctgccgttcgatgtcgctgacattatccttacgagctctcctgaagacgatcgtgccgagcagcatctggaacttgttgtagccggcagcagcgcaatgacgagcggttcttacacggtcaaagtacgttacaactatgagaacaccgatattacgattactctgcccgtcgttatcgagggcatgcctgagatcacgatggctccggagaccgtaacggtgggttacttggcgggaacgagcgaatatacggtgatcgagaagtatgccgagaaactctggaataaggattgggctccgaagtacttcgccgacgagcagacgttcgtagatgcgatctatgccgctgcattcgaggctactgccgatgaagcggaagacggaaccgtgctcatgcaggcgtccgacgatgcaaataacatcgctatcaagctcggcgccggagccaaggagaagagctacgcgctcacggctaaacttactgccgactggggtctcgatgtaacggttgccgttacggttaatttcgaaggctttacaggcgagctggtacagggcgacaactatgcggatccggtgcttctgaaagcaacgctctcgacgacggcttatgtacccgatggacttaacctcgacaacacttgggttgcacccaaagattccaagggcaatgaaatcggaaaggttgtcttctcggtagacaccgaagagtatgaaggcgcttcggtagacgccgacgccaagaccctgacgtggggtactgagtacaagggcctgaatatggcgctcagcgtaaaactgatgctcgattcttatgtccttgacgagcaggtgctcaatgtcgagattcccgacccgatcaaggataagacgatcagcctgcgtaagaatgccgttactacgatctccgcgagcgctgacgatgcttccctgactgtgggcgatctcctccagctggcgaatatcaacggcaataacgtattcgaggctacggctgccgatgagaatacggttctcggagtcgttgtcaagtacgaggtgatgaatccggaggttctcgttgaccgaattgatactggggccgatttcgcaaccaccggtacgattacggtcaagggtaatgccgacagcgaattcgtaggcgagaagacggtcaaggtgaaagttaccgtatcctatgattacggcacggaccgcgttcacaatcttgatatcaaagttaagcagaaagccaactaataaagaatcccccttttccgcgaaatccggcgccgttcttcggggcggtgccgggagcgcgggaaatcaaatccctaaagcaggaacggcacatcccaaagttttttggttaacaactcccacttttaagtaacattcctgcttgcggcagaccgaagaggcgcggtctgccgcttttttatcgttccgaccgttgctgcaatccgtcggaccggatacgataggctgttgccggatcgggtgcctttgtcccgacttatatgaaaaatcagccgcagtcaatactgcggctgatttgatttgatttgagcctatttccggcatttcccggatgttcttcccatgttccccggcgttttccggcattttgggcgtttttttcggtccgccgttccgtcgcgccgcagagccatgcgggctttacgggcgtgtttgcggggctgtagggctgcgtttcatgcgccagccttccgcgtccctcatcgtatccccggagggcgtgaaaggcccctgaatccgtttttctgcaatacggacagcgccgcgtcgtcggtgctgatttcgggcgggatttcgcgggcgtttcgtgcgcgggcgtattagacgccgcgccccgacaaagcctctccggcgcttcctcccccgtgttgcggcggtttcagccttattttgccttggcggctttggcggccaccgcttgatccagctcgatgatgaagtccgaaaggacgttcatgtagttgatgaaggcgtcgtatgccgagtcgtacgggttgaagtaggagtgtacgtcgccgtccgagagccatttggtcgccatgtagtagaagtggtccgaggtctgcatgaaactccatacatagtcgaaatcggggcttttcagggcggcgaccttctctttctgggcgtagagtttcgagaaagcctcgttctgcaactcgttgccgagccacgccgtcacgtcgcgctcctcgtcggcccacgacattacgtgcggacagtggagtacggacaccggctggtacttcttggcggcctcgcttacggtggcgaactccatgtcgttcttcttggcgaggatcgctttgggaagcgcacgcatgaattcgaagattcccgtatccgccgtctgatgctccccgaaggtctcgtagtccatgaagaggttgatgacctcgcccggcgtttcgtccgaagagagccatttgacgtatttgtccgccgtcagcggccattcgtcccagctgcggttcgagaaacggaacgcaatgtcgtccgagagcttgtagttgcgcaacagcaggcgcaatttctgattgatggcgttggcatagacgtagttaggcgatttccagcccagcacgtgcttggcgccttcggccagcatcgtgcggaagcccatgtcggcgaccatggcgccgatctcgtcggagtagatcagctcggtgttgcggaaggcggtgggcttcacgccgaactccttcttgatcatggccgtatggagcttcacctgttcggtgaaatcctctttcgacgccagcgacgccagcgaatgggagtaggtttcggccagaaactcgacgcatcccgtggcggccagctccttgaacgagtcgagcacctcaggcgcgaaggcgcggaactgctcgacggcgatgcccgtgatcgagaacgaacagcggaatttacccttgttctccttgatcaacttcagcagcagggcgttcatgggcaggtaacactgccgggcgactttctgcatgatcgagcggttcaggaggtcgtctaggtagttgtggtccttgcccatgttgaagaagcggtacttcttcagtcgccaaggctggtgtacctgaaaatataagcagacggttttcatagggtatctgtatttttattgttttttgttctcttcaatgaccgcttcgtatacggctttgatcttcgccgcggcgtcgttccacttgaggttggtgacctcttcgagtcctttcgacgcgaacatgcccgacagggccgggtattggatgaggccgtagatggcgtcggccagcgcgtccacgtcccagtaatcgaccttcacggcgaagtcgagcacttcggccacgccgctctgtttggagatgatcaccggcacgttcgagcgcatcgcttcgaggggcgagatgccgaaaggttccgagaccgacggcatgacgtatacgtccgacagctggaacatcttgtgtacgtcctcgccgcgcaggaaccccgtgaagtggaagcggtcggcgatgcccagccgcgccacgcggcggatgacgtggttcatcatgtcgcccgaaccggccatcacgaagcgtacgtcgggtacgcgcttgagcactttggcggcagcctcgacgaagtagtcgggacctttctggtaggtgatgcgtccgaggaaggtgacgatcttgtccttcacgccgcgttcgggcattttgcaggggccgccggcgaagcgcacggcgttgtgcaccgtcacgaccttttcggccggaacgccgtagcggttgatgacgatgttgcgggtaaggttcgaaacggcgatcacgcggtccgcggcgtgcatgcccgcacgctcgatggcgtagacctgcgtattgacgttctcgccgctgcggtcgtattccgtggcgtgcatgtgcacgacgagcggcttgcccgacacgcgcttggcggcgatgccggcgtagtaggtgagccagtcgtgggcgtggatcacgtcgaactgcccttcgaggtccttggcgacctgcgcggccaccacggcgtaacgggccacctcctccatgaggttggcgccgtactttcccgaaaaggtgtaacgctgtttccatgcgtcggtcgtggaccagacctgctgacccgattttacatagcgttcgtggtagacctcgtactcttcgggggagatgtagggcaccatgttcgagtcgatgtggatgaacgacattttttcgagaatgtcgtcggctccgctcccggtcgaaccatagagagcctccacgtcgctggcgttcattacgtgcgtgaaacgctgatcttcatcgccgtaagcgtggggaaccacgaacgtgacgtctacgtcgttgcgcgccagaccgcgcgtcatgccgtagcacgccgttccaagaccgcccgcgatgtggggcgggaactcccaaccgaacattaaaactctcatatcttaattcttttcattttgttgcctttatttctttgcggcttttcctgccgctgctttcggcgccgcctttttcgccgcggccttgggggccttcgccgcggtcggacttttggcggcggcctttaccgtcttcccggcgcttttcgccgcaggcttcgtcttcgccggctttttctctttcggaccgttcgttctgccgcttttcttcgcggctttgggcccttgggaatcccctttgctccgctcgcggatcatgcggtggatgtccagtgcggctccgacgctccacgcctgcgaaatggctccgcgcgaagcgtagggcgggtcggcgtcgtacaactcgcagatcgagccgatgccgtaacgctggatgtcctcgtcgaagttttccagcgcctcctcggcctgcggcaggaatgcgtcgccgtcgatgtcgaagcaggccttgatgtagaagggcagcagccacggccataccgagccgtttttggcggcgaagtcgcgttcggcgggcatgccctcctgcgaacccctgtaaagcgggttttggggcgacagcgtccgcagtcccttcggggtgagcaggtgctggcgcaccgtgcggatcacctccagttgcatcgtctcgtcgagcatcttgtaattcagtccgcaggcgacgatcatgttggggcgcgtcgatttgtcgggaccgctgccgtccacgaagtcggccaaatagccctccggcaggcggaacagttcgatgaacgactcctgtgtgcgagccggaagcgaggcccacgccttgacgaaggccttgtccgtcttgtccccgtatttgccggccagttcgagcgcatagcatacggcgttgtaccacaaggcgttcacttcgacctgatagccgttgcgcggggttacggggcgtccgtcgatcgttgaattcatccacgtcaggggcacctcttccgatgaagcccatatcagcccgttgtcgtgcagcgccacgcggccgccgattccctgccggtagctctccagtatgtctttcatggccgggccgtagctcgcccatatctccttggcccccacttcgcgttcgagctgctggagggtccagaaaaaccagaggggggcgtccgccgcgacttcggccgaggcgctgccggtgaacatgccgtcgcgcatctcccgcaccagcgtatccagcgcgtcgatgcagtcctccttgtgtccctgttcgagcgtgatgcccggcagcgagatgaaggtctggcggcccgaaaccccgtgccacggatatcccgacaccacttcggtccggtcgcccggacggcggatcaggaactgccgcgccgagtgttcgagacagctgatgaagtcgatcttatgcgtacgccgcgcgatggatgcggcgaaaacctcttcgatggttttggtcgagcccatttcgtcgagcgacgccgagaagatgatgctctcgcccttcttgagctccgcttcgaaatagcccgtcgtgagcaggtcttcgtacccctcgtatccgcgggccagctcctgctggtattcgaatccgtaataccagtcgggcgcgggcacgaactccgtgccgggtttgctcgtctggagatagagccacgggaacgagttgtagagacggcacttcacgccgttcacggcggggtaggagtgtccgtcggcctccatgttggcgtgcgtcagcgcatgcttgtcgcggaaggcgaggaacggccgcagccgcagccgggtttcggagtgggcgtccacgagcgtgtagcggatcatcagctgcgtccgcttgtgtatccagagcatctccttcttgaggattacgccgcccacgcggtaggtgatcgtcggcgtcggcgtatactcgaaatcggtgatatacttgtggccgcgcggctcgtatacccccttgaaacggtgcagcgccagattgaacgtctggtcgtgctgcaccacggtctcgtcgagcgacgagagcaggacgtaggtccggccgctgtcgtcgatgggggccaccatcagtccgtgatagcggcgggtgttgcagcagacgatcgtcgtactcatgtagccgccgatacggtccgtcgagagcatttcgcgctggagggagtactccagattgcccaattcgcttttgtcgaaagtaagtgctgacatatctttcttaaaaatgcagttcgtcctataaagatattaaaattttcagataaataatacccgataacagtaaattaataccttttttaacattattcacgccaaatttgctaggcccactttaccaatgcaaaatccatgcggtgcggcaggtgggggttgtagggatagagacgcagcgccacgtcgaacgtgccggcctcgccgggaacgtaatccagcgcataggtcacgcggctgccgtcggttttggtgtgtttcagcccgatggtgcgggttacgttcaccttgccgccgccgacgatctgctgggcgatgaccatctcgacgccgatatcctcaggccggaggttggcgatgtccaccgtcacttcgaagtggtacttctcgccgacgaagatcgcctcgtcgtcgatcctcacgcgctggacgtcgatcacgcggaccttgtcccatgcggccgaaaccttgcgcttccacgccgcgatctcgcgggccagcttgtagccgccttcgacgatttcgcgcttgcgggccgcgagcttgttgtagaaccgctcctcgtaatcccccagcatgcggttggtcgtgaagttcgacgcgatgtcggcgacgcactttttgaccgaatccacccactggtgaggaatgccgtcgctgccgcggtcgtagtatttcggcacgatctgctcctcgatggtgttgtaaatcatctcggcgtcaagctcgtcctgatagccctgatcggcgaacgtgcgttccatgggcagcatccatcccgcgccctccttgtagccttcgacccaccatccgtcgagtaccgagaactggagcacgccgttcatgacgcacttctcgcccgacgtgcccgacgcttcgagcggacgggtcggggtgttgagccatacgtccacgccctgcaccatgcggcgggccagctccatgtcgtaattctgcaggaagaggatcttgcctacgaactgcggcatggcggccacttcgacgatgcgtttgatgaggtcctgacccggcttgtcgttagggtgcgctttgcccgcgaagatgaactgcacgggacgctccttgttgttgacgatcgccgacagccggtcgaggttggtgaacagcaggtaggcgcgcttgtaggtggcgaagcggcgggcgaaaccgatggtcagcacgtcgggcttgatgccctcgatgatctgaatcatctggcgcggcgagtcgagacgcacctgattggggtcgctgtagcggcggcggatatgctttacgagcttgttcttgagatacatgcgctcgttccacagctcttcgtcgggaatctggtggaccttctgccatgccgggatgtcgtaggtgtgcccctcgaatccgtcggcgaaatagcgggcgtacaggcggcgcatgctggtcgcgatccacgtcgggaagtgcacgccgttggtgacgtacccgatatgaagctcgtttttgaagtagcccggccacatgctgcccagaatatccttcgacacctcgccgtggagccacgacacgccgttcacctcctgcgagaggttgcaggccagcaccgacatcgagaacttctcgttggggtcgttggggttggtcttgccgaggttgatatactgttcccacgtgattcccagcacgtcgggatagtgcgacatgtactggcggatcatcgattcggggaatgcgtcgtggcctgcgggaaccggcgtatgggtcgtgaagagcgacgacgagcggatcacctccagcgcctccgagaaggagagcttcttgtgggtcaccagatcgcggatgcgctcgatgccgatgaatgcggcgtgtccctcgttgcagtggaatacgtcgtgtttgatgcccagcttgcgcagcgcgcggataccgccgatgccgagcaggatctcctgcttgagccggttctcccagtcgccgccgtagaggtggtgcgtaatctgccggtcctcttcgaggttggcctcgaagtccgcgtcgagtaggtagaggtccgtgcgtcccacctgacatttccagacgcgtgcccagagcgtacgtccggggaaggcgatggtgaccgtcatccagttgccggcttcgtcgcgcacgggcgagatcggcagcttgtagaagttctgcgcttcgtaggtcgcctcctgcgcgccctgcgacgagagccgctgcgtgaagtagccgtaacggtacagcaggcccacggccgccatcggaacgttcttgtccgacgcctccttgaggtagtcgccggccagaatgcccagaccgccggagtaaatcttgagcgacgaatgcaggccgtactccatcgagaagtaggagatcgaggtcgccttcggatcgggtttctcgttcatgtagtcgcggaactgcgcatatacggcgtcgagctggctgaggaaattcgtatcctgttcaagctccttcatgcgctccacgctcattttgtcgaggaatgcgatcggattgcgttcgcactcggcccacaacgcatggtcgatgctttcgaacaggtcgcgcgtgccgggattccagcaccaccagaggttgcgcgacagctcttcgagggcgtgcagccgtttgggcagggtcttgtccaccatcatgcggttccagttgggcttctcggcgaaaagctgctggcgcacgaagttgatctgctcgttgcggtttccgccctcgtccagcacggcgcggttggtgcggatgaccgaactttcgacagcctcggagtaagcctgctcgtaggcggcgaagaggtgttcccagagcgccgtttcggagatttcgtaggccgacacgcgcatctcgttcacgtgcttgtcgtccagcaggctgaagtgcagcagcgactcggcgatcttctcttcgacctcctgatcgttgtagtcgtcgcgcagaacgatctccacgcccgcatgctcgcgctgtttggccgcccagagaccgaatccggccagcgtcgtggtgatcgtcggcacggagaaggccaccgattcgagcggcgtgtatccccacggttcgtagtaggaggggaatacggtcatgtccatgccgaccagcagttcgtagtaatccttgccgaagatgccgtcggccttgttgaggtaggtcggaacgaagatcaccttcaccttcgaatcgggcgtggtcagaatgctgccgttgagggcgttaacgatcgggtcgctgctctggtattcgaggtagtgggtcgtgtatttgtactgcccgccgtcgatgggtttcgacgggtcggccagatgcgcctgcaggtccgcgcgcggaccgcggttggcggcgggcacggtgatataggccagcacctgacgtttgagccggggcgatgcggccagtttcttgagcgattcgatgaatacgtcgatgcccttgttgcggaattcgtagcgtccgctggtgccgacgatcagcggctcctcggcgaacttttcgcccagacacgcttcggccaccgagatcatcgttttgcgggcttcggcgcgcttcgcgtcgtactcctcgccggtccagacgaagtcgttttcgaagccgttgggcgtgatgcagtcaggctcgcggcccagcaggaatttgcactcgttggccgtgatgtcgctgaccgtgacgaatgcgtcgtggtaggcagcggcggccttctcgatcgagtgtttggccacgacgttgaactggcgtgccagctcgtcggcattgaacttggtcaggtcggtgtagagcggcaggtggttgcccgcgatgcagcggcccatgaccgtggcgtgcgtggtgaagagtgtcgccacataaggcgcatggcggcgcaggtagagaccgcccgccgcggtcatccattcgtggaaatgggcggcgatcttgtcggtcgcggtgcagaagttctcgacataggaggcgatcaccgcgcctgcggcgtagccgaagagcacgggctcgatgtagtcccactgacccgaaatcgaatcgacgtggtaggcctcccagagtttcttgagtatttcgtccttgcggggaatcagcgaggtgaagtccaccagtatcgccgtcggttcgcccttgattttccagtgtcccacgcggatgcggatgccttcggcgtaaagcccctgacgccatgtcttcagcaggttgggatcctcctcgaattcggggtttacgccttcgtgctgcaggtcgggtccgatgaggatatagcgctcgttgaatttccggatggccgtttgcgctttggtcgagactaccgtatggatgccgccgattttgttgcagacctcccaacttacctcgaacaggtaatcgggggttagttttgcattgctcatatttgtgatgcttgtttgtaatttacttgtcgaatcggttgaaaaccggtgcaaaggtaatacttatatttatattaacaatctcgaaagggtaattagtaaaaaaatttaagaataacttaacatttcagtttcacttggttgcgcgcgtcgttatgtttcgaaaagggcctcgatcacggcgtccgagatcagaaaccgctccgggggaaccgccagccgtccgcctgcgtcgcggagcgcgccgctttgcagatagggggccgcctcttcgcgcatccgctccagccgtttcgtgccgaaacgggccgcgacctcccgcgtgtcgattccttcggcggttcggagcgccgtcatgacgtactcgttgaaacggtccctgttcgtgaggagttcgcgttccgccggatcgcccgcgatgtaccgctccaccgaacctacgttccagtgccgctcctcgccgtcgaacgagtgcgccgcaggaccgatgccgaggtacttcgcgccgtgccagtacgccgcgttgtggcgggcgcggaagcccggaagggcgaaattcgagacttcgtagtgttcgaatcccgcttcggtcagcgtgtggtggaccgtgaggaactccgtttcgctgatctgctcgtctacggcccggaattcgccccgcgcggcgcgccgtccgaaagccgtatcgggttcgacggtcaaatggtatgccgaaatatgctgtacgccgagcgaaagggccgcatcgagcgagcggcgcagcgtatcgccgccgaaacccggcatgccgaagatcagatcgacggtgatgttgccgaatccggcgcgctgcgcagcacggaccgcttcggccgcctgcgcggccgtgtggcggcggttcatcagtttcagacagtcgtcgtcgaacgactgtacgccgatcgaaaggcggtcgatgcccgcttcgagcagcccgccgaggtactcggccgtcaggtcgtcgggattggcttcgagcgtcgtctcttcggcgccggagcagtcgaagagttgtgcggcgtggtccagcagtcccctgatcgcttcgggcgtgcagagcgacggcgttccgccgccgaaatagcgggtcgtcaccgcttcgccgcccggatagccgcgccggtcgtccagttcgcggtgcatggccgccagcaggtcgtccatgcgccgcaggtcggcgcttttgtaaaagtcgcagtaggcgcagacgcgcttgcagaagggtatgtggaaatagagtccggccatggttaccaaagttaagaaaaaaaacggagacgacggcacattattttccgatttttccgaaacaggccgaaagccggtgcgctccgcgtttttcggaggctgccggattcgtccggcacaaccggaaatcgcggcagcatgtttgcggtatgtccgcagttcctgagctgcgcgcggcttcgggcggaggagatacgaagttataaatgaatcatatacgggtgccggaaaaaataatgttctttttttgtgttttttactgttaattttttcacaagtgtaaaagtttttctacctttgtgcggttaaagtccgcacgcgcggatttcgacggttaggttaaatcttggatttgatgttttattaaaaataacgattgctatgaacaaaatggatttgaaaaagtacgggatcacgggtgtgaccgagatcgtgtacaatccgtcgtacgacgaacttttccgcgaggagaccaagaaaggcctccgcggtttcgaaaagggtcaggagaccgaaatgggcgccgtgaacgtgatgaccggcgtttacaccggccgttcgcccaaagacaagttcttcgtaatggacgagaccacgaaagatacgatctggtggacttccgacgagtataagaacgacaacaagcccgtaaccaaggcggcttggaaagagctgaagaagatcgcttcgcaggagctgtcgggcaagaagctttacgtcgtcgatactttctgcggcgccaacgagaactcgcgtctgaagatccgcttcatcatggaggtggcttggcaggcgcacttcgttaagaacatgttcatccgtccgaccgacgccgaactggagaattacggagagcccgatttcgtcgtgctcaacgcatcgaaggccaaggtcaagaactacaagaaactcggtctgaactcggagacggccgtcgtcttcaacctcaccgagaagatgcaggtcatcatcaacacgtggtacggcggcgagatgaagaagggcatgttctcctacatgaactacctgcttccgctcaagggcatggcttcgatgcactgctcggccaacaccaacgccaaaggcgagacggctatcttcttcggtctgtcgggaaccggcaagaccacgctttcgaccgacccgaagcgcgagctgatcggcgacgacgagcacggctgggacgacgacggcgtattcaacttcgagggcggctgctacgccaaggttatcaacctctcgcaggagaacgagcccgacatctggaacgccatccgccgcaacgcgctgctggagaacgtgacggtagacaagaagggcaagatcgacttctccgacaagtcggttacggagaatacccgcgtatcgtacccgatcttccacatcgaaaatatcgtgaagcccgtatcgaaggctccggccgccaagaaggtgatcttcctctcggccgacgcattcggcgtgctgcccccggtttcgatcctgaacgccgagcagaccaagtactacttcctctccggcttcaccgccaagctggccggtaccgagcgcggcatcaccgaaccgactccgacattctcggcctgcttcggcgcagcgttcctttcgctgcaccccaccaagtacggtgaggagctggtgaagaagatgcagaagtcgggcgccaaggcttacctcgtgaacacgggttggaacggcaccggcaaacgtatctcgatcaaggatacgcgcggcatcatcgacgccatcctcgacggttcgatcgacaaggccgagaccaagacgctgcccatcttcgacttcaagatcccgacggctctgcccggcgtggatcccaagatcctcgatccgcgcgacacctacaagaacgccaaggattgggacgtgaaggccgaggacctcgcaaaccgcttcgtgaagaacttcgtgaagttcacgggcaacgaggaaggcaagaagctcgtagctgccggcccgaaggttaagtaattcccgatgactgcggcgcaggccgcgcatcgtcagaacgcggaagcggggtatttccaccccgcttccgtttttttgcgcatgtagtgcgccgtccggatcatgccgtccggaggaacggacagagtcggcaaaaccggcagccccgcagattccgcagcccctccccgcagaatccgtggaacttgcggagtcggcggaattagcggaagaacgggcagaacccgcggagtcggacgtttcgaaaccggcgtttgctttcggagtgtagccgtgttttgccggcccgtaacctgtccggacacagccggcaagacgaaacgccctgctcctcaaagagcagggcgtttgtgtttgtccgccgtttgcggccgtttttcgcaatccgtgttatctgctgcaggaaccgtcggtgcgcagtcgcttgggcatgaaaatccggtagccgatcgagacgccgagcttgttgggataccactccgacgagccgttgaacggatcggggttctccggctgcaccggacggtggggatacatgtctaccttgccgtcgaaactgtatccgttgtagtggctgtccatccatgcccatccgaagaaggcgtcgagcagccaccgctccccgaactggtgttcgtaacccacgcacaggccgatcatcatgccgtagcctttgcagtagcggtcttcgaatttcagcttccagccttcgatatagggtttcgacatgtcgaaagccatcatgccgatattggcgcccagataccagccccggttgtgctccttgaagtagcggcggtattcgcccatgaagatggcgaaggtcatatgcttccggttgatcgacttccacggcgagaccacgatgtcggtctgcagggtcgatttgggggatatggcgaattccacagaggggtttacgacgccgaccagcgcatagagcgcgttgagtttgacgtagccctgcgatgctgcgttctgtatgccgaacagcgaaaacaatacgatcaggaccgaaatcttgcggaatggctttttcatcgggacggaatgtttaggaggggcaaatatatgaaaaaatccggccaatatacgaatcgggccggattttcatgcggatgaaaccgtttcagacggtcatgatctccttctctttcttcaggagcgcttcgtcgagcagcttagagaatttttccagcagcttctgcgactgggtttcgccgtccttcgattcgtcttcgggcatgccctccttctgggccttcttgaatgcctcgacggcgtcgcggcgggcgttgcgcaggctgatgcgggccgtttcggcttcgccgcggatctgcttcaccagctccttgcggcgctcttcggtcaggggcggaatcgtcaggcgtatctgctcgccgttgttcgagggggtcaggccgatgttcgagtcgatgatggctttttccagcgggcggagcatgttcttgtcccacggctggatcaggatcgtcttggcgtcgggaaccgtgacgctggccgcgcccgatacgggcacctgcgagccgaagtaatctaccatgatgccgttcagggcgttgggcgaggctttgcccgcgcgcacgttcagaagttcctcttcgaggtggtcgatagccttctgcatacggccggaggcttcgttgagaatcgttttggtatccatagttattcgagtgttttttcgatggttttgatcatttcgtcgaactcttcggggtcgtaccctaccgacgccagcacgaccttgccgttgcggtcgatgacgaaattacgcggaatgtagttcgacgcataacggtcgtagacggtctgcgaggggtcgagacccatcgggaaggagtagccggtcttttcgcggaacgccgccacggtctggtgcgtttcgccgcgcgagatgggcaggaatacgaaatcgcggcctgcgaaacggtcgatcacgtcgctctgcacgcgcgccagctcctgccggcagggcggacaccacgtggcccagaagttcagcaggacgaccttgcctttcagttcggcgaggtcggttttgccgccgccgaacatctcgaccgtgaagtcgggggctttgtcgccggccttcacgagcgtcgtcgattcgacgtcgcctgcctttttgctgctgttgccgccgcatgaaggcagcagcaggatgacggcgacgatcgcgacgatcagcgccagcatgatccataattgtctgttactcttttttgtcgccatgttttttcgttgttttggtttgtcgggcactttgtcgcacggagtccggagtgccggccggaagctcctatgaaagcccggttacgagcgttccgatctgttcgcctgcaagtactttgcccagattgcccggcgtgtccatgtcgaagacgatgatgccgagtccgttctcgcggcaaagggtgaacgccgtgaggtccatgactttcagcctgcggtcgagcacctcctcgaacgtgatccggtcgaacttcacggccgtcgggtccttttcggggtcggccgtgtaaacgccgtccacgcgggtgcctttgagcatcacgtcggcttcgatctcgatgccgcgcagcgccgacgccgagtcggtcgtgaaatagggattcgacgtgccgccgccgataatcaccacatagcccgcttcgaggtactcgatggcacgggccttggagtagtattcgccgatgggttccatgcggatcgaagtcagtaccttggccttcacgccgttgtcctccagtgccgactgcagcgccagcgagttgatgatcgtggccagcatgcccatctggtcgcccttcacgcggtcgaagcccttcttggcgccggtgagtccgcggaagatgttgccgccgccgatgacgatgccgatctggacgcccgttccggcggccgccttgatctgttcggcgtaggactggagcacttcgggcgagagtccgtatttctgcgaaccttgcagcgattcgccgctcagtttgaggagtattctcttgtatttcatgttgcaatggatttaccgtaacgcgaagatagaaattttttcgaaaaaaaccggcatcaatgactatctttacagaaaatagacgccctccggaccgtgtccgaacaaattcggcgcggtgtccggtgcgcacgcttttcgacgccgttccggaaaggctgcgtccggccaaaaggcggacgggcttgcttttgtgccctgcttgcattatctttgtctcgccatgacgccggaagaatacagactgcttctacatatcgattcgccggaggacctcaaaaggctctccgcggaggagttgcgcgcttactgcgacgagttgcgacgctatatcgtcgacgaatgttcggtaaatcccggacacctcgcgtcgagtctgggggctgtggagctggccgccgccctgcattatgtcttcgacacgcccgccgataagatcgtgtgggacgtggggcaccagacctatgcccacaagatcatcacgggccgccgcgaagcgttcaaaaccaagcgccggctggggggcatcagcggcttcccgcgcatgtccgagagcgaatacgacgctttcggcgggggacacgcctcggtgtcgatctcggcggccttcggcatggccaaggcggccgaactgcggggcgagaagtatcgggtcgtggcggtcatcggcgacggttcgatgaccggcgggctggccttcgaagggctgaacaacgccggggccagcaagcgcaccaacctgctggtgattctgaacgacaacaacatggcgatcgatcaggccacgggcgcgctgaaaaactacctgctcaagatttcgacttcggtccactacaaccgcttcaagcaacggttgtggggcatcctttcgcatacgccgcgcctgctgcgtctctgccagaaggcgggcaacgccgtcaagcaggggctgctcaacaagagcaatctgttcgaaagtctcaatttccgctatttcggacccgtggacggccacaacctcaaggaattggtgcggacgcttcgcgcgctgcgcgatatcgaaggacccaaactgctgcacgtcatgaccgtaaagggcaagggctacctgcccgccgagcacaaccagcccgtctggcatgcgccggggcggttcaatcccgatacgggcgagcggatttcgtcgccgggttcggcgtcgcgctatcaggacgtgttcggcgagacgctcgtcgaacttgccgaacgcgacagccgcgtcgtgggcgtcacgcccgccatgccgtcgggctgctcgatgaatctgctgatgcaggccatgccgtcgcgctgtttcgacgtgggcatcgccgaggggcatgccgtgactttctcggcgggactcgccgccgcgggcatggtgcccttctgcaatatctattcgaccttcatgcagcgggcttacgacaatgtgatccacgacgtcgccattcaggaccttccggtggtgatgtgtctcgaccggggcggtctggtcggcgaggacggcgtgacgcatcacggagtcttcgacatggcggccttcggctgcgtgccgacactggcgatcgccgcgccgatggacgagctggaactgcgcggcatgatgtatacgggactgcagtacggccatcccttcatgatccgctatccccgcggctgcggcgaaggccggatgtggcgcggtgcgcggttcgaaaccctgcccgtgggccggggacgcaagctccgcgacggagcggatgtggcgctggtgaccgtcgggacggtcggcaacgccgccgcacgcgccgccgcacgcgccgccgaagaaggggtgagcgcagcccattacgacctgcgcttcgccaaacctctcgacgaggaactgctcctcgaagtgggtgcgaagttccgccgcgtggtgacggtcgaggacggcgccctgcgcggaggcgtcggcgaagccgtcgcggcatttttcaatgcacgcgggctggacgtttcggtgcgttcgctgggcatcggcgacgagtgggtcgaacacggaactccggctcagctctatgccctctgcggctatgacgaggagggtattctgaaagccctgctcgaaacgaaacaggcgccggtctgcgccgaataatatccggactccttacatcgtaaacacccagtcgtcggctttgctgagcgtcggattcagccggaaaccctcccactcgaacgctttcagctgctgcggatcgccgatgcggtttttgaggatatgacgggtcatttcgccgcggcacattttcgtatagaccacgacggttttcagccggtcgtcttcgcggatgcggaattcgggggtgacgacccgcacttcgcggcagatgcgcttccagtcgaacagccgcttcatctcactgctggccagattgaccagtatgccgtcgtcggccttgatcttctccagaaaggcgtccgtcagtttgtcctgccaatattcgaaaaccgtctgctcgccgtggccgggcagtacggcgtcgccttcgagccggtaggtgcggatcgcgtccagcgggcggagcagtccgtaaaggaacgaggtgatgttgaggtgcgcctgcgcatattcgaaatccccggccgtgaaatccgccggagcgatccgtttgaacacgatgcccgtgtaggccgccagcgccggcagcgccctctccgcatcgtcgtggaagcggctgtagcggagccggttcgtcgcggcgatccgatggtttacgcgcaggattttcgccagctcttcggtggagagcgtcgccagctgtccggccaactccccggcctgcgcgccgtaaaggggcgaagtggtgcggggtatcggcagggaggtgctttcggccatcgttttggcgcaggagaggagtatttgcatgatttgtcagttgttgtcgcccgtctgctccggaaagcgggtgaacgggacgaagggcgtcaccgtaaaatcggcggtgagcaggtagttgcggtgcggattttccatgtaaacgtttttgcagatgcggtaacgggcgtatacggacggatagacgcgcggcgcgagccgggccgtgaagccgtaggcgtactctttcgtctgccgggcgtcgccggggacgggaaattgcgggcggccgatgccgatcagcagggagttccatgcgtcggcgcccggcagtgtttcccaccggccgttttggaacctgcaaacggtgtagtccgtcccgaaatagacggtcgaatcgcctcggtagcggatcgtaagccgtacgcagtcggtctccgcagggtagaaggcgtattcggcgtccatgctcagtccgtcgggcggcggcgtgccttcgggggcgggcggatagggcgtcgtgtcgggatcgaacccttcgagccggatcagggggctgtcgtgcacgtaacggcggaagcgggctttcatcgccgagtcggcccggagcagacggacgcggacgatcccctcggtttcgtcggtcccggacgaccggacggcgtcggcgacgcttgcgatttccttgggcgcagatgtgcgggcggcgttcgcgattccgtcgaatgcttcgcgctccggtgtgcaggcggcgaatccccggtcggtcgtgcgcaggatgtcgagacggcgccacacgctgtcctgcagttcgcccagttcgcgcgccgtgggacggcgctgggcggtcgccgtacaaccgg

SEQ ID NO: 1149 - DNA, 45227 bp, unidentified
  source 1..45227: mol_type = unassigned DNA
cgacaaggccgacacctaccccaacatgctgtccggcgggcagaagcagcgcattgcgattgtgcgcgcgctggccatgaaccccgacgtgctgctgtttgacgagccgacctccgcccttgaccccgagatggtcggagaggttttggagctgatgaaggagctggcccgcggcggcatgacgatggtctgcgtcacccacgagatgggctttgcccgcgaggtcgcaaaccgcatcatcttcattgatgagggcattgtcaaggtcgataagccgccgaaggagttcttcgccaaccccgaaaatgagcgcttgaaggcatttttgtcaaaggtgctgtaaatttgtatagaaagcggtctgccgatggattttcggcagaccgcttttttgcctgcggaaacgcatcgcttcgcctgcctctgcgggaaactccctccggcgcgttcgcgccacttccctaagcgtcggattgcgcgaaatctcgcggtcatccttggcgagtaagatgtgcttcaagcatccgcgttccgttgtccgtaggggcgcattctatatgcgcccggcctgtgtgcggcggcggaaacgccccgggcggatatggaatccgcccctacgctttcaccgcgcacgatattctgctgctattatatacgccccggcaagttgattctttgcgcaaaatgtggtaaaatagcactattactatggataactatgcaaccacgactttacacataaggaacaggtatttttatggctgaaaatctgcaaaccacccgcccggctgacgagggctggactacggtcatccggcccaagaccggctggttcgacatcgacctgcaggagctctggcgctaccgcgacttaatcatgatgttcgtcaagcgcaactttaccgtgctgtacaagcagacgatcttgggccccgcgtggatcattctgaacccactcatcaccaccgtgattttcaacgttgtgttcggcggcatggccaacatgcccaccgacggcgtgcccggctttttgttctacatggccggcaatacggtgtggaccttctttgccaactgcgtcaacaatacagccaatacgtttgtgacgaactcacagatttttggcaaggtgtacttcccgcgtctgacgatgccggtcagccaggtgctgacaagcctgatcaacttcggcattcaggcggtcatgtacctgatcttctgggtgtacttctttgccacgggcagcggcgtcacctttacgctgtgggtgctggctgtgccgttcgtcgtgctggaggtcatgctgctgggtctcggcgtcggcatcatcgtgtcgtccttaacgacgaagtaccgcgatctggcgattgccgtcggcttcggcgtgcagctctggatgtacgcctcccccgtcgtctatccgctgtcgatgctggacaactccccgcgcctgcgggtgctcgtccagctcaaccccatgacgtcgccgattgagattttccgcatggctaccttgggcaccggcacggtcacgacgttcggcatcgtgtacagcctgatttttaccgctgcggcgctggttttgggcgtcgtgctgttcagccgcattgaaaagaccttcatggataccgtgtaagaaaggggcgcgtaactatgtctgcaaatgaaaaacgccctgtcatcgaggtcacggggctgaaaaagcaatacaagctcggccagatcggcggcggcacgctgacccacgacctgcaaagctggtgggcccgtgtgcgcggcaaggaggacccgaacaccgtcatcggcaccgaccagcggctgttcggccagacgtttatggcgctgaacggcgttgacctgaccgtctatcagggtgaggcccttggcatcattggccgcaacggcgcgggcaaatccacgctgctcaagctgctctcccgcatcactgcccccaccgagggcgaaatcaagatccgtggccgcgtggcctcgatgctcgaggtcggcaccggcttcaacaacgagatgacgggccgcgagaacatttatatgaacggcgcgattctgggcatgacccgcgccgagatcgacgcaaagctgccgcagatcattgaattttccgagtgcggcgacttcatcgacacacccgtcaagcgctattccagcggcatgttcgtcaagctggccttcgccgtggccgcgcatctcgacagcgagatcatggtcatggatgaagttctggccgtcggcgatatgaaattccagcagaaatgcttagggaaaatgagcgacgtcgccaatcaggacgggcgcacggtgctgtatgtcagccataatatgtcgaccattcgtcagctttgcacccgctgcgttgtgctggacaagggcagggtcatctttgacggcgacgtggagcaggccatcgcggtctacatggacaccactgacgtcaacgttgtccactacgacctggccgacgtcgcccgcatgacgggcagcgcgggcaagcggttccggctggaaacgctggatttcgttggcaaggagtcgagcgtgtttgccgataccgaaaagatgcgggtgaaaatcacctggcgcgtttcggagccgttcgcgggcatccacatgaagatgaacctccacgcgcgagattcgacgcccgtcggcatcacccatcccgtcgacctcggccccgccgagccgggcaaaatctacacctctgtgtttgaatttgacccgagtctgctgggcgagggacagtatttcttctatctcgacatttttgacggcgcgctggcccacgcggtctgcctggacaagcccgtgaccgagttcgcctttgaggtgacgaacagcgacctgacgatgcccgagtgggcgtccggctggggccgcatccacttcccgcccgtcaagctcgtgcaggagtaacgcatgaaaccgaatttgtacatctgccacaccgcgtatcaggtcttggtcgatctgctgcgggccgggcgctgcgccggcaagccccacacaatggtgctgtcggcctccgtgcccgacaccgccgcgctggcggcacgtctggacgcgacgggcgtggtcaagactgtccttgtggacgagacgcgctggcccgggaccgtgacggggctgtttgcccaccggcgcgcggcccgcgcctttgaaaagctgtgcggctggaaattgaaccgtgcagcgtttgaaaatgtctatatccacaacgattggagtgtgctgggccgctatttgcaggattgccgcgccgggtatattctgtgcgaggacacgttcggcagcacgctcggccctgaccagcatcttgtgaccgaccagcgcgccgcggcggattttgccgcgaagcagcgcggaaaaggctacctgtactggggcgacagcccgtggtgcgcccgcgtcgagagtgaggatgccgcgcggtgtacgctgttttcggcggaccgcatggtgacggacagcaaggccaaactgttagagagcctgaccgacgacgaaaaagcgatggtgcgccgcgtgtttttgacgcagcccctgcccgagaaggcagacggcgcgacgcttttgctgccccgcagctttgtggccgacgggctgatgacccaagtggagcaggacgcgatgttcaaagcggtggcggaaaaatacgccgttgggccgctctttatcaagacccacccgcgggacacgacggattacgccgccctgttccccgatgcagtcattttggagcgcacgatgcccagcgaggtgctgaacttctgcctccccttccatttcgcccgtgccgtcaccgtgcagagcttcgtcctgcgcggcttcaccgcggcggatgagaagatcctgctgacactggaggaggcgaggaaactggtctgatgcgcggggaaaacggcatccggccgggaggttctctcccccaccgcctgcgggcggagccccctcgcagagggggccaagccaccttgcctccctctgcgagggaggtggcgcggagcgccggagggagagaaccttcccaaagccacccgtgaaaggatatgtgcaatgctttactacaatcgaaaaaacgtaccgctagcaaagcagcttcgcagagatatgaccccatgggagcgtaaattgtggtattgctttctccgcaccttcaccccgcgcttccagcgccaaaagcccatcggcggctatatcgctgatttctactgcgcaaaagcaaggcttgtcatcgagctggacggggcacagcattacacgcccgagcaacagcagaccgacagtctgcgcacagagcttttcgcacagaaccatatcagggttctgcggttcaccaatttggacatagaccgccgctttgacggcgtatgccaaacgatagaggcggctgttcaggccgccgtgtaagcgaggtacacacatgaaaacaatcgctgtgattccggcgcgctacgccagtacccggatgccgggcaagccactggccgatgtgctgggcaaaccgatgatctactgggtctacaaggccgccagggcctgcccgaagctggacgatgtgctcatcgccaccgacgacgagcgcattgccgacgcctgcaaaacctacgatatgcggtatattatgaccagccccgaccacgacacccccaccgggcgcatctgggaggtcagcaccgtcgaggacgccgacctctacctgcagctcatgggcgacgagccgctcgtcaaccccgcggcgttcgacctgatcctgcctgacacgctgcccgatgacccctattacgtcgcggtgctgacgaacgttatggagcaccccgccgacgtcatcgacttctcgaaccaaaaggtcgtgacgaatgccgcgcgggagatcctgctgatctcccgcagccccatcccctacccgaagggcacgctggatttcgagtacgagaaggtcaccggcattcagctgtacagcaagcaggcactgaaattctaccatgatacgccgaaatccatccttgaaaaggccgaggaaaacgacatgatgcgctttatcgagaatggccataaggtacacgccatcgtcagcccgtacaagacagtcagcgtggacacgccgaaggatctggcgctggtcaatgaaattttgaaggagaagcagcatggctgatattaaactgctggactgcaccctgcgcgacggcggctatgtgaacaactggcagtggggcttcggctcggcgcgccgcatcatccagacgctgacccgcgcgggcgtggacatcgtcgaggtcggctttctgcgcaatgtggacggctacgaccccgacgtgacggtctgcaacacgattgaggagctgaaccgcctgctgcccgacgagggccagcgcggccacacgatgtactccggcatggcgatgcgctccaactacgacattgccaagctgtccccctacgacggccacggcattgaaatcatccgtatcaccgcccatgattacgacattaaggacggcatggactttgcccgccgcatcaaagaattgggctacaaggtctccatcaaccccatcaacatcatgggctacagcgacaaggacctgctctggatctttgagcaggtcaacgaaattcatccgtggcagttctccattgtggataccttcggcagcatgcgccgccgcgatctggagcgcatcgtcagcatggctgaccataatttagccccggacatccgcctggcgctgcacctgcatgagaacatggcgctgagcttctgcctggcgcaggaatttctcgacaagcatctgcgccgcgacctggctgtggacggcagcctgatgggcatgggccgcatccccggcaacctgccgattgagctgatcgccgactatatgaacgagtacttcggcggccactacaacattgacgacctcatggatgccattcaggaccacattgcgcccatcaagggcaactgcgcgtggggctacaccccggcatacttcctgtcggccaagttcaatctgcaccgcaactatgccgagcattaccttggcaagggcgatctgacgaaccgcgacatcaaccatattctggcggccatcgcgccgaataaaaagactgtgtttgatgccgcctacgccgacacgctctacaccgagtacaagaaccgccgcatcgacgacgcaggcgcactggccgccctgcagagggcctttgcgggcaagaccgtgctggtgctggcccccggcggcagtctggctgccgaggctggacgtgccgctgtagcagccgcgcaggccgacgtgacagtctcggccaactttgtgccggattttgtgacgcccgactatgcgtttttcacgaacgcaaaacgatttgacgtggatgccgcctacccctgcccgctgatcctgaccagcaacctgcgcgccgataaggacgcgacggtggtcaactatgaccggctgtccgccaccgacgcgcagggcggcaacagcgtgctgatgctgctgcgtctgctgcgccagtgcggcgcggcgcgggtgctgctggccggtgccgacggctacaggtcgggcactgccgcctacgcggacgagggcctgcacacccacaccgggcgcggtgcggcctacaatgcccagatggcgggggccatccgcgcggcgggcctgcccgtggaatttatcacccccagcgagtacgagagggtctgacgatgatacgactgctggtgctggacgtggacggtacgatgaccgacggcggcgtctactacgacgccaccggcaatgagctgaagaaatttgccatcaaggacggcgccgggctggtgctggcgcgcacggcgggcatccgcgtgatgatctgcaccgggcgcgagtgcgaggccgtgcgccgccgcgccgcagatttgaaaatcaccgacatctaccagaatgttggcaagaaagcagcgttcctgcgggatttcatggctgaaaacggctacgcgcgggacgatgtcgcctactgtggcgacgacctgaacgatctggcggccatggcgctgtgcggctttgtggcctgcccggcggatgccgcgccggaggtgcgggcgcgcgccgactatatctgcccccagcgcggcggcgagggtgccgtccgcggagcggtggagaagatcctgcgcggggacggacgctggaacgacgctgtgaaaaaggcgtttcaggtggaattgtaacgctaaacttgcgggcggctgtagggggcgatgcttgcatcgacccgcgggcggatgcgagcatccgccccttcggcctaacggaaggagatttcatgaaaaacaaaaaacatacccccctgctggcggcactggcaacgcttgtcgtactgctggcgggcgtggtgctgatctggctggcggaggtccggcccgatgtgggcaagggccgcagtgagatcgtcaccgacttcctgcgggccgagcttttgcaggacggccagaccgcaacgcaggtctttacctacgacaaggatattttgacgataggtcttgaattttacctgccgggtgaccagccctgcggtgcgctggacgttgtgctctacgacgccgacaccggcgaggagctgtcccgctccgtcggcacgatggactacatcgtgcccgaccagtacacgaccctggggatggaccccgccgtgaccgggcaggagggccgtcgctacaagctggccgtcacgccgcactacgcgacggacgcgattttagccatcggccacagcgacggtgtcgcgctctggaaggagcagatggccgtggatgaccgtgtgatcgacggcacgatggcgatgcagatcacctaccagcgcatcggcggctacctgacgcggttcttcctgcttgtgggcgggctggccgccgtgctggccgcgctggccgtgtgggcggtgcttagcaaaaaactggcactgcaccgtcttgtttttgcgctggtgctcggctttggactgctgtacagctttgtgctgccgccttatgccgcgcccgacgagaaataccacatcaaccagagctttacgctggcctgccgctgggccaacgacctgtcccacgacgagtggcggatgggtaaggtgcccacgacgacgagcttccgccgcgtcggtgacgaggacgccgacctgcaaaacgagaacacgacggtctttacgtgggaggcgttcacctcccagctgttcaccaccacagatcagccctttgacagccatcaggaatataatgaattgcagaccgaccagaacccgcttctgtacgtcgtcagtgcggcggcggtatttctggcctatgtgctgcattttggctttgcgcccgcgctgtttttggggcggcttgcaaatctgctgctctttgcggcgctggcggcgctggcggtcaagaccgcgccgttcggcaagcgggtctttaccgtggccgcgctgctgcccatgacgctgcacctggcggccagcttcagccgggacgcgccgctgctggggctgtgctttgtgttcacggcgctgctgatggacgcggcgttcggcccgaatcagaaaaaggcgctctcccccgcccggctgacggcgctgctgttctgcggcgtgctgctggccccgggcaagctcgtctatctgccgctggcggcactgctgctgctggtgcccgccgcgcggctggggcaccacgccagggcgaagaagtgcgcctatctggccgcctgtctggcgctggcgctgctgctgaatacgggccttctgaccgatacgctgcgcagcgggcagaccgcagtgcagaccacggcggcggaggacgcagaccgcacggtcaagagccgccccgcagagccggacgaagcctacgaggccgagatctgcggcgagagtacgctggaaaactacgtcaagcggctgtattattacgtggacgacaaccgcagccccgcggcccgcgaggtcgcattctgggtgcaggccatgcaggagggcgacgtcagcccggcggtgctggggcagagtttcctcttttcgcccgacagggccaacggctacaccgacggccaggcattttacacgatggcctcctatgcgctgctgggcaccgatgtgaccgacggcaacgcggacgcctacctgccctattttgccgagggcggcgcggtacaggcctacaagcagctgttcaacctgaccagctgtgtcgagagcttcgccgcgctgggtgtggacgtcggcacgatggatgaccgcatcccgctggaccgcacggtgctggcgcaggaggtcgaggccgcccgcgcgacccgcagcacccagagcacggcggacgaggccgacaaagccacctacacgccgggctacatcctgcgccatcccgtggatacggtgctgctgtttgtgcgcagcgccgtggaaaacggcgaccattacatccgcacgctggtgggcggcagcctgagctactacaccgttgatctggcctggggctgggtcgcggtgctgtacctgctgctggcctacgcggcgctgcccgtgcagggcgcggtgatgaagcccgccggtaaggcgcgcggctggtgctgcgcggcggcggcgctctgctgcctgctggccgtggccgggtgccttttgtggacacccacccattacgacacgctgtacggcctgcaggggcggtacttcctgcccgtgctgccgctgcttctgctgacctgcctgccccgccgtctggccgccgtgcccgacgaggacaccgcccagacccgccttgtggccgcgcttgcattggtacaggcggggatggtcgtgaatattatgctggcgattattgcaagataaaaacaagataatagatactaaaaaaggagtgcgcaaggcgcacgatttcaaattttgcgggcgcgtcagtgagccgcatccaccatattttttatcttttatcgcttatcttttcgctaaaaaaggctgtactatggttatctgtttcttctcaacgcaatacctccccacccccggcggggtcgagcggtatacctggaatctggcgcggcggtgtgtggcggcagggcatcgcgcccttgtcgtcacggcgtcgctgccgggcctgcccgcgcgggagcgtgatgccgacggcatcgaaatctaccgtctgccgtcctggcctgtcatgggcgggcggttccccgtgttaaagccccttgccgatgcagacgacctttgggcacagggcatcgactttgcggttatccagacccggatgtacacgcaaagcgtctgggccgcacggcagtgtaagcggcgcggcatcccggcgctggtcatcgaccactccaccggctatatgctgcacggcgggctggccggggcgctgggcaaggcgtatgagcacgcggcctgcggcagcatccgccgctgcgggttcccgttctacggtgtctccggggatgtctgccgctggctggaaacgttcggcatccaggcggcgggccgactgcccaacgccgttgaccctgccgagctggaacggctggcccacgcagacaacgcggttgactggcgcaggaggctgaacgtgcccgcggacggtaggctcgtcgcctttgtcgggcggctcatcccggagaagggggcgctgcggctggctcaggccgtgcagggcattccgggctgtacgctggccgtggcgggcaccggccccgaggaggccgctctggccgcgctgggcggcggtatccatgcgctgggggcactgccgcatgagcagatcgtccagctgctgacacaagcggacgcttactgtctgcccaccgagtacgccgagggcttccccacgacgctgctcgaggcggcggcctgccgctgccccatcgtgacgacccgcacggcgggcaccgacgagctgctgcccggggacgactacgcggtgtttttggcaaacgccgcgcccgagaccatccgcgcagggctggaaacgctgctggcggaccccgctgcggcccgcacccgcgccgaaaacgcccgccaaaacctttgcagccactttacatggcaggctgtctttgctacaatgatggaagccgtaacgtctgccaaaaggagctaagatgtcaaaattactcatcgtcatccccgcgcacaacgaggaagccaacatcgtgcaggtcgtcgaggagctgacccgcagttatccacagtatgattacgtggtcgtcaacgacggcagccgcgacaaaaccgcggcgctttgccgtgcccacggctatcggctcattgacctgccggtcaacctggggctggcgggcgcgttccagaccgggctacgctttgccgcggagaacggctacgactgcgccatgcagatggacgccgacggtcagcacaagccggagtatatcgccccgatgctggccgcgctggaggagggcaacgacattgtcatcggcagccgcttcctgaccgtgaagaagcccaagacgctgcggatgctgggcagctacatcatcagctggtccatccgcctgacgacgggccgcgccatctgcgacccgaccagcggcatgcggatgttcaaccgcgccatggtcgaggagtttgcccagaacctgaactacggccccgagcccgacacgatcagctatctgatcaaaaacggcgcgacggtcaaggaggtgcaggtcgaaatgggcgaacgtctggcgggccagagctacctgaccttctggcgcagcgtgcagtatatggtcaaaatgtccatctcgattctgttgatccagtggttccgcaagcgcgacaccgagacgccctaccccgaaaggagcctgtaaaatgttcgatcaaacgctgattcgtgtctgcctgatcctgggcagcttcatcacggcggggtacatcctgcggcgcgtgcggcacgcaaaggtccagatcgaggatacgatcttctggctgatgttcagtgcggcgctgctgatcctggccatcttccccggcatcgcctattgggccgcaaacctgctgggcttcatgagccccatcaactttgtctatgttgtcatcatctttttgctgctggccaagcagttctttatgtccatcaaattgagccagctcgacagcaaggtccgtatcctgaccgagcaggtcgccctgaacgaggaaaaggcggagcgggataagctggacctgtgaaaaaggcttcccccttgggggaagctgtcagcggccccgaccgctgactgatgaggggcgggtgcgccatggcaggccgctcatgggcaattgcggcaaggctccccctcatccggccctatgggccgccttttttcccccttgggggaatgctttgggggtgcgcaaaattaaaatttgtattccctccaaaactatgctataataaagtattgactaaagagaaagaaggtctcagatatggcttataccccgaaactgacctataagggccgcccgctggtgcgctgcggcaacgatatttactacggctcgatgaaggacccgttcgttgtctacctgcaggtgctttcgaccaagaaggaaaacggcgtcgacgtggccgacaaggtccacatcgtgctgctttccaccgacgagagcaagcccctgcccgagcgcattgcccgccaggccaacaaagtcggcctgtacaacgcgctgtccttcggcgacatcatgctgcagggcgcgctgcggaagaagtaagcgtctcccctgccccgcacaaaacacaaagccccgcagccaaacggctgcggggcttttgcacttgatgtcaaaacggggcgggcggatgacgggcatccgcccatacagaacggagatttactgcttagtggtcctgcttgtcggtctcctcggcagagtcgtcctcggtgccttcaagctcgatgtcgaaggtcgcgccgcagtgcgggcagaccagatcgccctcgggatccatcagggtctcctcgtccagcgtggagatctggccgcagttcgggcaggtcacctcatacatggtgctgtcgtcctcggcgtcctcctcgtcatcctcgtcatcctcgtcctcatcggcgtagatgtcgctgacgacgtcgtccagatcctggtcgagggtctccagctcgtcgtacacctgatccagggcgttgtcgtgctcggtgacctgggcggccatctcctccagcaggtccatcatggcggcaatgaccttgccgttcttggagtctgcgtcaaaatccataccggtcatcaggccgcggatgtaggcggcctttgcattcagatccatagccatagtcaaaatcctccctaatattaaaaaatgccgggcgcggcggtacggccatgcccggcaaagagaacctaatcagttcacgcgctccatatactcgccggtgcgggtatcgatgcggatcttgtcgccctcgttgatgaacaggggcacgcggatctcggcgccggtctcgacggtggcgggcttcagggtgttggtggcggtgttgcccttgacacccggctcggtagcggtgacctccagctcaacgaagttggggatctcaacgctgaaaaccttgcccttgtagctcagcagcttgcaggtgtcgttctccttgcagaacttgaagttatcgggcacgtcagccgcgccgacaggaatgtcgtcgtaggtctcaacatccatgaagtggtacagatcgccatcctcgtaggagtaggtgacctcgcggcgctcgatgaaagcctgcgggaacttggcggtcgggttgtagctggtctcaacaacagagccggtgatgacgttcttggtcttggtacggacgaaggcagcgcccttgcccggcttgacgtgctggaactcaacgacctgaaggacctggccgtcctgctcgaaggtgacaccgttacggaattcgcctgcagaaatcatatagaaattcctccataaataaattatacatacctgtttatattttacaggatgaaaagcaattttgcaagtcctgttcggacttttttgcgggaaaattgatattttttgtccaatttacagcgctgcgtacccctggaccagcgcggcggcgtcctcggcctgggtaccggcggattcacagatgatcgtcggggccaaatgacgctccttgagcagcgccagcagcggtgcgtggggcgggccgaacgctgtatccgcaaaagtcagatggcacttctcgccgcccttggtgtaggcaatgcgggaaaaatgcgcgtggaaatgcacggcgcggtcatcccccagccgcgcggccagcgtgtccagcagggcggcgtagtccgcggcggcggtggcgtcggcaaactgcacgccgcagctgcgggcgtacaggtgcccaaagtcgatgcagggcgtaatgcgcgggtcgacctcgcatagagccagcacctcgtccagcgtgccgagctggttgaccttgcccatcgtctcggggcagaggatgcagtccgcaaacccggcctcgtcgcaggctttgacagcgcgggccatcgtatccagcgccttttccagcgcctcctcccggctctgcttgccgcaggagccggaatggaagatgacgcgccgcccgcccagcgccttgacgagggcgcagctttgcagcaggtagtcgatgctgtgcagccgcttgtcctcctcgaggctcgacatactgatgtagtacggcgcgtggacggacagggcaatgtcccgctcggcacaggcggcaccgagcgtggcggccttgtcgtgggccagccgcacgccgcgcccgcactggtactcaaatgccgtcaagccaaagcccgccgtgtaggcggcgatggcggcggggtcaaactttttgactgtgtagctgtcggccagaccggctgtgccgaagcgcggggtattattcatacagcttgccgcccttctgatagtatttgtcgatccagtatggctcaaacttgcgctttaacagcacaaatttgttcttgtcgtggttcgtgcggggcatcaggtagaggcacgggcagccgtacagcccggcggccatccggtccgcaaagatctggtcgccgaccatggccatttcgctctttttgcagcccaggcggcggcgcgccacccgcaggccgatggtgaacggcttgcaggccagcggcacccagtctagcccgatgcgctcggcaaaggggcgcacgcgcttggccgtattgttggacacgatggtcaggcgtatgccggctgcgcgcatctcgtccagccacgcctgcacagtgggctccagcacctgactgttgtcagcggtcagggtgttatccacgtcgagcacgagggctttgatgccgtgtgccgcgagaaaatccgggtggatgcactcgatggttttgaagatgtattcaggggttagaatcatggtggtgaccttttaaataaaagttgtaagggtcggcgtctccgacaccctgcgggagcatggcggaggccgctgcattgtcgggtcgatgcgggcatcgacccctacgtgtaggggcggattccatatccgcccgtggaaggctgccgccattgccgctttgtcctaaaataaaagtgcaggcccgcgcgtaacgcgaacctgcacagtcgttcgttgtaagataccttacttaaacttgcgcttgcgggcagcctcggacttcttcttgcgcttaacggaaggcttctcataagcctcgcgcttgcggacctcagctaacacgccgctgcgagcagtgctgcgcttaaaacggcgcagagcgctctcgagggactcgccctctttgacacggatctccgacatcttcttccctcccttgacctgagacaggagtttgccggtcaaatactattaaccagtaaaaaagattatactatattgaccccctgtctgtcaacaacaattttcgctaaaatgaaaatttttatattgttcatatttaggaccctttaccccagcaccgtgtgccacacccacagcgcaccgtagattacgggctgatgcagcatgtagaccagcagcgtattgcgcccgatggcacacagaggacgcagcgcggcgggcggctctccactgccggggcgccacagccgcgccagaaaaacaccgcaccagaacaggaacacccacggaaggatcgggaagtaatccgccgacgtgaaccttgtcaggtcgggcaggcccagccagaacaggttggcccggtacagccccgcaggcaccgcacagagccgccaattctcgaagcccaaatacccttcgggcagctggttcgtcagcgcaaacagcgccgcagacgccgccaggcccgcgcccgcgggcaggcgctgcaaaagcggatagaccaggcaggtcagcagcacggcggcagcgttcaggtgcagaacgccgaaccagatcgcctccgacggcatgaacaccgcggtcacaaacgtcagcacagccgcgcagcccgccacgatcagcccgttctttgcgggccgctttgccagcgggaagctgaaccccgacagcagaataaagctccaacaaatatattgctgccacacatggcagccgggggcccagatgttgtaccagctgctttcgtggccgaacacatacacccagtcgtacatggcatggtaggccagcatgttcagtagcgccagcccgcgcagggcgtcgggcagccacatacggctggttttggtgcgcagtacgggcattttaccgcctctttcccaaagatttactgtaacactattctagcacacccgcgcgcggcttgcaatcgcgcgggttttgcggtacaataaatcagataagggagtgtgaaggtatgaaggacatccgccttgtggcgttggacctcgacgggacagttttcaacgataaaaaagagatcaccccgcgcacgctggcggctatccgcgcagcctgtgcacgcggcgtggcggtgctgcccgccaccgggcgtacagccagcggcatccccgcggcgttcacgtccatccccggcgtgcggtacgcgctgacctccaacggagccagcgtcgttgacctgacaacgggcgagcagctggtgaaccagccgttcgggaccgagcaggcattaaaaatttacgatcttcttgagcagggcggcggcatgatgagcattttcatcggcggcaaaagctacacgacccgcgcaaacgccgagaaccacatggacgtggtgcccgaaaacctgaaaagctacttccgcacgacccgcattgaggtagatgacatgcacgcgacgctgcgcacccacgcgcacgagatcgaaaagtacagcatgatctaccacgacgaggccgagcgcgacgccgcctggcgtgccatcgaggccgcctgccccggcgtggaggtgacgtccagcttgccccgcaacatggaggtcaacgcccccggcgtgacgaagggcagcggtctgctagcgctggcggcacacctaggcctgacccgcgcgcagacgatggccgtgggcgactccggcaatgaccgcgcgatgatcgaagcggcgggtctgggggtggccatgggcaacgccaccgacgacatcaggaaaattgccgatgtcacgacggatgacaacaatcatgacggtgtggcagcggctatagaaaaatacgtgttgtaaaatagcaataaaatatacgagaggtaaatttatgaaaaatgttctggttggtcagtcgggcggcccgactgccgtcatcaactccagtctggcgggcgtctatgagaccgccaaggcttgcggcgcaccccatgtctacgggatgcagtacggcatcgagggcgtgcttgagggcaagctcatcgatctggacactgtgctgggcgacaagatggacattgagttgctcaagcgcacgccgtccagctttctgggcagctgccgccacaagctgcccgaccccgccgttgacgagaagccgtttgtgcagctgtttgagctgttccggcagaacgacatcggcgcggtgttttacatcggcggcaacgactcgatggacacgatctccaagctgagcgcctacggcaagaccgtcaacagcgagatccgctttatcggcgtgcccaagaccattgacaatgacctgatgctgaccgaccacacccccggctacggcagcgcggcgaagtacatcgccacgatcctgaaggaggtcatctgcgattccagcgtctacgacctgcgcagcgtgacggtggccgagatcatgggccgccacaccggctggctggctgctgccgccagtctggctgccggtccggactgcaacggcccagacctgatcctgctgcccgagtgcccctttgacgaggaggcgttcctcaagcgcgtggccgagctggaaaaagagcgccacaatgttattatcgcggtcagcgagggcgtcaagaacaaggatggcgttttcctgtgcgacctggtctccacggcaggtcagctggatgccttcggccacaaggccatcctgagcggcacgagccgctatctggcggacctgatccgcgtccgcttgggctgcaagacccgcgctatcgagttttctacgctgcagcgctgtgccagccatctggccagccgcaccgatgtgaccgaggcctaccaggtcggcggcgcagcggtggaggccgccatgcgcggcgagaccgccaagatggccgccatcaagcgcctgagcgaccagccctaccgcgtagagaccgagatggtcgatgtgacgaaggtcgcgaactttgagaagaaggtccccgccgactggatcagcgaggacgggatgcacgtcaacgagaagttcgagcgctacgcccgcccgctcatccaggccgagctgtcgccgatctacatcaacggcgtgccgcggcatattcatctgtaattttgtaaaaataaaaacggagcaccgtatgaaaatgcggcgctccgttttttgctgctgtaggggtcggcgtcctcgacgacccggcggggtgagggcaccccaccctacgtatactccgcggacagacgtggggcggcatgccctcaggccgccgcgggggtgttgaggttacccggaaagcccgtcggaatccctccggccctgcgggccacctccctttgacaagggaggcttagacgcaaaaaggacccgcatttccgcgggtccttccaaatcatatcaatacagacgaaatcagccggagaccttttccttcaggcggccgctggccttgaagccggggatggccgtcggctccagcttgctggtgaccttggtcttggggttggtgaagttcttggtctggcgctcacgcatctcgaagcggccaaagcctgcgatggtgaccttgtcgccgctcttgaggacatcgccgatggtgccgaagatgccgtccataaccttctcaacttcagcagcggtcatgttggtgtcgttggcaaccttggtaatcaactgagatctcgtcatgatatttttaactcctattcttataggcacacaattgcccggtattattacgctattattatagagaaaatagtgcgcagaatcaagagttttttcggaaatcaaacgtttttcggcaaaaactataaaattttcgcaatcatctcgtcaaaaagtgacatttggcaaaaaatgcacgttccatgcaaaaatattcttgacgggcaaagtcttacagccccatgcagacggcggtagggcgcatccggcttgacgtaccggctggtgcggcccccggacatggcgtcgtcggtgaaggtcaggcagcaggtgcggtccgcatcggcataagccagcgtcagcccgccgtcaaaggccagcgagaagtcgcccgccggggcggcagtcaggtcaaagcagacgtccacggcctgctctgcgccgtcgcagctgacggccaggcagacgttgtgcccgcggccctgcctgatgtagtcgtagtcaccggggaaaaggttctctcccccaccgcctgcgggcggagccccctcgcagagggggccaagaaaaaacaaaaaccgcatccttgcggacgcggtttgtttgctgcttacttattcccctttcgccgcttcgcggtgcaggttcgcaatgtccaccagctccatctggctgatgtcatggtcaccgcgcagggcgtcgacgaggacgcgggcagtgtccatggccgtgatggtcgggatggacagctccgttgccttgcggcggaacttgacggagtcacggtgcgggtcgcggccatgcggactcgtcgagatgatgtaatccaccagaccgctctccagcaggtcgatgacgttggggcgcgcgccgctcatctggcgcacaacgctgcagggcaccatctcgttgttcaggaacctggcggtgccgggcgtgccgtagatcttgtagccgtagtcgtgcagcttccaggcaagctcggcggcctcagccttgtcgctgtccttgaccgagatgatgacgcaggagccggggccgggcgtcttgaactgatagccagccgcgaccagacccttcatcatggcctcgtggaaggagggcgcaatgcccaggacctcaccggtggacttcatctcggggccgagcatcgtgtcaacgccgtgcagctttaagaagctgtagacgggcaccttgacggcgtagtacgggctcttgccgttgcgccacaggccggtgccgtagcccatgtccttgagcttctcgcccagcgtgcagcgcacggctaggtcgaccatcggcacgccggtgaccttggagatgtagggcacggtacgggacgagcgggggttgacctcgatgacgtagacacgatcattctggacggcatactgcacgttgaccaggcccacgaccttcagctcgcgggcaaagcggcccgtgtaatcgaccagcgtgtcaatgaccttctggctgaaggtgtacggcgggtagacgcagatggagtcgccggagtgcacgcccgtgcgctcgacctgctgcatgatgccgggtaccagataatcggtgccgtcgcagatggcgtcgacctcgcactcggtacccagaatatacttgtccatcagcacgggatggctcatgtcaacgtgcttcgtgataacgcccatgtactcgatgacatcggcggagttgtaggcgacgatcatgttctggccgcccagaacgtaggacgggcgcatcaggacgggatagccgacctcctgcgcggcctgcagggcctcgtccagcgtaaagacggtgcggccctccgggcgggggatgccgcagcgctccagcagctcgtcaaagcgctcgcggtcctcggcctcgtcgatggcgtcggcgggcgtgcccaaaatcggcaggccgatgtcgtccatgtgcttggccagcttgatggcggtctggccgccgaactgcacaaggcagccgtccggtttttcggtctcgatgatgtggtcgacgctctcggggttcagcgggtcaaagtacaggcggtcaccggtgtcaaaatcggtggagaccgtctcggggttgttgttgacaaggatggcctcgcagccgtgctgcttcagcgtccagaccgcgtggaccgagcaatagtcaaactcaatgccctgaccgatgcggatggggccggagccgaaaacaaggaccttcttcttgtcggggtcgctgcgctcggcaatgaacggcttcgcttcgttgtcctcgtcgtaggtggagtagaaatacggcgtcttggcggcaaattctgcggcgcaggtatcgaccatcttgaacgcggccttcggggcctcgggcagggtgtccacgcctgccagacggcgtatcgttttgtcgaggaaaccgaacctcttggcattcaggtacttttccgtcgtcagctcgccgtttttcaggcccatctcaatgtcggccagatgctgcagcttgtcaaggaaccaccagtcgatcttggtgatgtcgtaaatgacgtcgtgcgccacgccgcgcttgagggcctcgtagacgcagaacgcgcgctcggagtcctgcacatgcaggtgctcgatgacttcttccgtcgtcagcttctcgaaatcgggcagcgtcatcgtgtccaggccgagctcggtggaggaaacggccttcatcatggcgtgctcaaagttgttgccgatggccatgacctcgccggtggccatcatctgggtgcccagagacttgtcggcgtagacgaacttatcgaacggccacttcgggtatttgacgacgacatagtcgagggccggctcaaagcaggcgcaggtctcgcccgtgacatcgttcgtgatctcgtccagcgtgtagccgagcgcgatcttggtcgcgaccttggcaatcgggtagcccgtcgccttggaggccagcgcggaggaacgggacacacgggggttgacctcaatgaccgcgtactcaaagctgtcgggcttcagggcaaactggcagttgcagccgccctcgatgcccagttcggtgatgatgtccagcgcggcggtgcggagcatctggtactctttatcggacagggtctggctgggcgcgacgacgatggagtcgccggtgtggatgccgacggggtcaaggttctccatgttgcagaccgtgatgacgttgcccttggagtcgcgcatgacctcgtactcgatttccttccagccggaaatgcacttctcaacgaggatctgatggatcggggacaggcgcagaccgttcgtggcaatttcgtgcagcttctcgcggtcctcgcagataccgccgccggtgccgcccatcgtgaaggcggggcggacgatgacggggtagccgatgacctcggcaaagtccagcgcgtcgtccagatcttccacaaccttagaagggatgatgggctgatgcagcttctccatcgtgtccttgaacagctggcggtcctcggcgcggtcaatcgtgtcgggcttgcaggccagcaggcggacgccgctgcggtccaaaaatccgttgcgggccagctccatcgacaggttcaggcccatctggccgcccaggttcggcaggatggcgtcgggcttctccttctcgatgatgcgctcgatgacctcggcggtcagcggctcaatgtaaacatgatcggcaatgtcggggtcggtcatgatggtggcggggttggagttgacgaggacggtctctacgccctcggatttcagcgcacggcaggcctgcgtgccggagtagtcaaactctgccgcctgaccgatgatgatggggccggagccgatgaccagtacctttttgatacgcgggtctttaggcattgttgattactcctttcgcggccagcatacggctgacgaactggtcaaacagaaattcggtgtccttggggccgccgttggcctcggggtggaactgcacggtgaagcagttccatttcaagtagtcgacgccctcacaggtgccgtcgttggcgttgaggtagctcatctggccgacggattcgggcaaggtgtccgccataacggcgtagccgtggttctggctggtgataaaggtgcgctgcttggccgggctggtgacgggctggttggcgccgcggtggccgtatttcagcttgcaggtcttggcaccggcggccagggcggtcagctggtggcccaggcagatgccgaaggtcgggatgccggtgctcagcatttcacggatgttcgcgatgatttccacgttctctgccgggtcgccggggccgttggagagcatgaggccgtcggggttgagggctgccagctcggcggcggtggtcgtgccgggcagcacggtcacgcggcagccgcgcttctgcaggcagcgcacaatgttgttcttgcagcccaggtcgagcagcgccacgtgcagcggcgtgtcaccccatgcaccggcagccgtcggctcataggtcacggcttcgcggcaggtgacggtcttgacggcgtcgacaacggcgtaggcggcgatctcgggcagcagcgcagccttcttctcgggctcggcgtcggggtcgaactcggtggtgatcgcgccgttcataacgccgctctcccgcagggtgcgggtcaggctgcgggtgtcgatgccctcaatgccgatgatgccgttctttttcaggaaggcatccagcgtttcctcactgcggaagttggacggggtcttgcacgcctcgcgcacaatgtagcccctggcccaaatcttcgtgctctcgacatcctcactgttcatgccgtagttgccgatgagcggataggtctgggtgatgatctggccgtagtagctggggtcggtcagggtttcctcaaagccgaccataccggttgcaaagacgacctcaccgatggtggtaccggggcagcctacgctgacgccgcggaacacccggccattggccaatatcagatatgcctgcatagttggtagcctctcactttacatttaagatatggagtgaggagagaggagaaaaggcaaactgtacccatctcctatctcctatcttttacagggtttgcttcgcagcttccttcattttgcggctgcccaggtgcaccagcgggagcttgccctccttgcagatggggcattcctcaggggcgtagttgggcaggtcgagcttgagggcgctggcgacgatggggatcggggacggggcctcggcgcgggtgcggtccacgacgcaggcaatgcccacgcagatgccgccgttttcctcgatgacgcgcttggtctcgaggctggaaacaccggtggtgacgacgtcctcggcgatgatgcagcgctcacccgggttgatcctgaagcgcttgagggtcatgacgttgtcgacgcgctcggtgaagatggcgcgcttgcccatctggcggcccagctcgtaggcgtagacgatgccgcccatggcagggccgaccacgacgtcaatgttcagctctttgagcttctcggcaaccggggccatgacctcggcggccttgtcggggtactgctgcagaaatgccatctggcagtatgcgccggagtggcgcccggaggaaagcaggaagtgcccctctaaaaatgcttcacattcctttaaaacttcaagtgcttcgcgtgccataatttgttcctcctgtatgttattcaacttatagtagcatattttgtataaaaatgcaagcaaaatgtatatggcgggggcttcccccgcgggggaagctgtcggcggcccgtccgccgactgatgagggccgggcttgccgttatagcccgtgaacgggcggatgaggggaaggcagccggtgatttaccgtgcgcaccctctgatctcatccagcgtcttaacgccgtgtgcgtccatccactggccgatctcgttcgtgatgcgggtgcaggccttcgggtccaggaagttcgcggtgccgacctgtaccgccgctgcaccggccatgatgaactccagggcgtccttaccggtcagaatgccgcccagtcccacgacggggatgctgacggcccccacggcctgccagaccatgcgcagggcgatgggacgcaccgccgggccggacaggcccgcaaacgtgttgttgaacacgggacgacgcttttccagatcgatcacgcacgcctggaaggtgttgcacaggctgatggcgtccgcgccggcagcctcaacggccttgcacatctcgggaatgctttcggcctgcgggctcaatttaacgatgagcggcacggtgcagaccttgcgcaccgcgctgacgacctcgccggcgtctgccgcgcggatgccgaacgcgagaccgccctgcttgacgttggggcagctgatgttcagctcaataaaatccacgcccgcggcgcagagcatctgcacgccctcgacgttttcttcaatcgtgtggccgccgaggttcgcccagacggtggtgccgcaacggcgcatggcaggcagctcgtggtcgataaagtgctgcacaccggggttctgcaggccgatggagttcatcaggcccgacggcgtctcgtagaggcgctcaccctcgttgccgggctggccgttcagggtcagccccttgccggagatgccgcccagcacgcgcagatcctcaatgcccgcgtactcggggccgaagccgaaggtgccgctggctgcgatgaccggcccggccagccgcttgccgagaaaatcaacatgcaggtctgccatcagtcaaacacctcctgtgcgttaaagaccgggccgtccttgcagacggtgaccgggccgattttcgtatggcaggtgcagcccaggcacgcgcccagaccgcaagccatcttcttttcaaggctggccaggcagggcacgccagcggcggcgcagagcttagccacgccgcgcatcatgaccatggggccgcaggtcagcacaatgtcgtacttgctcacgtccagcaggtcggtgaccaggccgtggtgtccctccttgccggagtcggttgcggcatagatgtcgcggcaccagggcacaaagcggtccatgccgtaggtcgtgtcgcggaagcccacgaacaggtcagggcgcacgcccgcgcggcagagctccttgcagagcagcagcagcggcgcggtgccgatgccgccgccgaccacggcaatgcgcttgtactgcccggccagtgcggcagtgtcaaagccgttgccgcaggggccggtcacggtcagcgtgtcgtcctttttcagcgcggccagcttgtgggtgccctcgcccttgacctgatataggaaggtcagtgcgccggtctggttgtcaaagtcgtcaacgctgatggggcgggaaagaatcggcgtggcgtccgcggcccaggcgcgcagcatgtaaaattgcccggcgtggggctcgcggctgcggtcctgccactggaccgtaaggcgcataatatcctctgcgacggtttcctggcgcaggaccgtcagattacagcttgttgcattcaccctgaatatcctcccgcatacgcacgcactcgttgtaggcagcctcgtcaaaggcaacgccgggctgcttcttgtaggccagcaggatgccgcggctggagttgacaacgccgccgttgcccttggtcaggtactgcgcgatgtccgccgccttgccgccctgtgcgccatagccggggatcaggaagaaggtgtccttgtaggccgcgcggatggcggtggcctcctcggtgtgggtgccgccgatgaccaagccgatgctggaatagccgtgctcgcccatgtagtccttgccaagggcggtcaggctgtcgccgacgaggtcgtacacatggcggccatcgtcgagctttttgtactcaaagtccttcgcgccggggttggaggtacggcagagcacgaacacgcccttgccctgctcggcgcagtacggcagatacgggctgatggagtcaaggcccatgtagggggccagcgtgatgatgtcggcctcgaaatcaccggtaaagtgcgccttggcgtacatttcggcggtcttggcaatgtcgccgcgcttgatgtcggcaatgacgggcaggccggtggcgcgggccagcttcagcgtttcggcgtaggcgcgcatgccgtccaggcccagggactcataataggcgatctgcaccttgtagcagcccgcgacgcccttggtggcgtcgatcagcgcacggttgaacgcgacgacgttctcccctgccgtcttggcggtgtcggtggtgggcaggtagctgatctcggtgtccaggcccacgcagaccgggccgtttgctgcgacgctctcgtagagcttgtccatgttggtaagcatgctgattcctccgtttgatgtatataaattgcggctctattatataatgctgggaatcgtaggggcggatcccatatccgcccgcgggactgtgccagcggcagcctgcacgggcgcatatagaatgtgcccctacgggtgttttgtgcgtgaaggggtgttattcttcaatctggaacgtaaccttcccgcctttgatcgtggttaccacttttccgtacagcagtgcgccgtcgtaggggcagttcttgctcttgctgtgcagctcgtcggcgtggacctcgtacatgtggtcaaggtccaccagcacgatgtcggcgtcgtagcccggttccagcatgcccttgcggtcggccaggcccagcacggcggcgggaccggcgctcatcaggaagctgagcatttccagcggcagacgctgctcacggcagagcttggtgtagcagacgccgaaggccgtttccagacccaccataccggcagcgcccttctccttctcctcggcggtgtggggggcgtggtcggtgccgatgcaggtcacggtgccgtccttgatggcgtcgatcagcgcggtcacgtcgtccgccttgcggatgggcgggttgacgcggtaggtcaggcggctgtcgtcaaaccacaggtggtgcggcgtgacctcgcagctgacccgcgcaccgcgcatccggctcatgcggacggcatcgacggattccctggtggagacgtggcacatgtgcagccgggtgccgtagtactcggccagatggcagttgcgcacggtctcgatgttctcggccaggcggtagtcccaggggctgatctcgcggtcctcggcgtgggacataatggtcaggccgcgctcggtggcaatcgcgaacgcgcgggccatgacggcgttgttcatgacgccgttgccgtcctcagtgatgaacttgatgtcctcgggcagggtcagcagatgatccagcgttttgccgtcgaaatccttcgtgatggagacggtctggtttgcgtcgcacaggccgacgcgggcggcctcggcctcgacggcgtgggcgatctcggcactggagcagaccggcttcgtgttgggcatcaggttgacgaaggtgtacccacccgcggcagccgcggcggagccggtggagatgtcctccttgtactcaaagccgggggtgcgccagtggcagtgggtgtcgatgaaggcgggcaggaccgtgcggcccttcgcgtcgagcacctcctccccttccgggacaagcagccccagaccgacagcggcaatttttccgtcgcgcagccagacctcaatggccttgcccgcgctgtcctttgcgttgcggatcagcatggtgggaacctccttaaaaataggaaactttgtcatagctgagagtgtaggggcgaacattgttcgcccgtcaactttgcgtggttgagcttctgcgggaaagccgcgcatgaggcaaacggcctgcgggcgagcaatgctcgcccctacaaagccccatgcaaaaacatcccgcagggatatttttgcaaaaaaaaacttttcccaaaaagggaaaagtcaaaaagtcatacacaaagcggcgacgggaaagaacactgtgccgtgatttttaaagacagaaataaaacgcatcatcccggcacactccttcctatgactttacctacgttttacttattgtaccatgcagggacggcggtgtcaatgcaaacgggctttttgcaaaagtaaggattttatagatttttgcgctgacttttggaggatttgacaaaatccgcaaaaatccgcgcgcggcgcgtacagcattgcactttgtccggctttgtggtatatttataataagtatggtaaataggaagaggaacgaactatgggcctttgggaagatgcaaaaaatatccgtgataaggaccccgccgcgcgcaatgtggcggaggtcatcatcctgtaccccggctttcatgtgctggtcacgcacaagatcgcacattttctgtacaaccaccggtgtttcttcctggcccgttttgtcagccagctggcgcgccacctgaccggcatcgagatccaccccggcgccaagatcgggcgcaagctctttatcgaccacggtatgggcatcgtctttggtgagacgacggagatcggtgacaactgcacgatctaccacggcgtcaccctgggtggtaccggcaaagacaccggcaagcgccatccgacgctgggcgacaatgtgctgatcggcgcgggcgcgaaggtgctgggcccggtctacatcggtgacaacgtccgcgtcggcgcgggcagcgttgtgctgaagaacctgcccgccaacgccactgccgtcggtgtaccagcggagatcgtccgcgtcggcaatatcaagtgctgcccggcggacgatctggaccagcaggatctgccggatattgtcaaccagcgcatctccgagctcgaagcccgcctgagccgcctggaagccgaaaagcagggtgagttcccgccggataaaaaagaataataaaaacgcacgccgtaaaatttacggcgtgcattttttgtcagtatggcttccccagagggggaagctgtcagcggccccgcccgctgactgatgaggggcaaacttaccgggaatttcccactgacgggcaatagggcaaacccgcccctcatccgcccatggtcggggcctcgggcaccttcccccacggggaaggtgatcaactcatttcagattccgcaaatccccgctctcgcggaaatcctcataatccagcgacagcgacgggctgtaataggggtcgtgcagaatattctcccgcccgtgcacggcgtagagacgttcatgctcggcgtcaaagcgtgcttttttggcgggatcgttctcgtcggagccgcgggacttgctttcgtagtggtagagctcggcgtagggcgtccagacaatgcgccagcccgcgttgcgcacacgcaggcagaagtccacatcgttgtaggcaaccgtgaactcctcatccaggccgtgcagctcgtcgtaaacggcggtgcgcaccagcaggcaggccgctgtcacggcggaaaaatcctgcaccgtggccagccggaacatatacccgctgccgccgcgcttgtggtacttgtggctgtgcccggcgtagccgcccagccccgtgatgatgccggcgtgctggatcgtgtcgtcgggatagtagagcattgccccgcagaggccgacgccgggctggctgcactcgcccaccatctgggtgagccagtcgccgttgatgacctcgacgtcattgttgagcagcagcaggtacttgcccgccgcgtacctgcggccaaaattgttgatgcggctgaagttgaagccgcccttgtaagtcacgacccgcgcgcggtcataccgctccggcagttttttgtagtaggccgctgtggccgggtcggtggaattgttctcaatgacgatgacctcgaaattctcgtaggtcgttttgacgtagatgctgtgcaggcatttttccaaatcgtcggtgtggtccttgttgggaatcaaaattgacacgagcggctgcggctcgggaatgtcccacaccacatggcaggtgcccgggaatttgcccggctccaccctgccctgccgccctgtggcggccagatggtcggccacggccttttgcgcagccttttccacatagggcttggccgccgtgccgccgctggtggacgccgcgtgcacgcgccagtaatacagcacctgcgggatgtgcagcggcttggctgcggggtcacggcgctgcatttcgtcgatgagacgaagaaataagtcgtgatcctgcgcgccgtcgcaggacgggcgctcaccgccgacggcgtcgaacagcgattttttgaacacggccagatggcagatgtagttgacggccatcaggtactcgggcgcatagtcgggcttgaagtggccgacgcgcgggtgctcgggcgttttctcaaacagggcctcgtcgctgtaggcaaacgccgcgccgctctcggccagcgctttgctcatgcaatagacggcatgaggcgcgagcatgtcgtcgtggtcggcaagggccagatactcacatgctgcgagcttcgcggcctcgttcgtattggcggcaatgcccttgttctcgattttggcgtagacgatgcgcttgtcctgcgtggcgcgggtgcggacggtctcgcccacgtcggggtgggcaccgtcgctggcgtctaccagaaccagctgccagttcggcgcggtctgcgcctgcacgctgtccaaaaattgctgcaaaaactgcggcggtgtgttgtacagcggcgtcagaatgctgatggtcggccagccgtcggcgcgggcggctgcgtcggcacgctgggtctccagcgtctgcttcgacggcagataccgcgcttttttgccgaagaaccgccgcttaaaaaagccgacggcccgcccggccatgacgccgacgccctgttctttcgtcagcgtccgcgcatagccgaacagttctttgatgcgtttcgtttcaaggctcatgggatggctcctcataaaagcagtctttgtgccaaaggcgggggttggattgaatgtattccgcaatcatgcggtaatcggtttcattgcggatgacgtggtcgtgaaaggaacgctgccaaaggtgcttatcgaacggtgcggcttgcccgcgcttgacaagacggatgtactcgacggtagaataccgtttgaacgcctgcacgatgctgataatcgtaggggcggattccatatccgcccgtgcccgttcaatctcgaccaacgcgtgaaaatgattgggcatcaccacaaaataacggcactgggccgccggatattggccgatgatctcccggaaaacgcgcgccgccatgcgggcggatatggaatccgcccctacgggagcccggttcgggccaaacaacattctgcgttggtgtgtgcatattgtgataaaataggcgccgttttggctgtaatcgtaaccctgcaaatggtgagacttgcgcttcggcaatacggtttccatcacttcaacccgaaattctcaaacaaattgttgaaatgggggttgtaataggggtcgtaattgtcgatatactgctgatatttcgtgtagaaattcgccttttcgcgctcataccgcttggcgttctcgcttaaggtatccagaccgcggctcttgctctcgtagtgataggcctcggctcgcggggtgtaaacgttcaacagccccttctgccacagctttaagcaataatccacatcgttgtaggcgacggcaaacttttcctcgtccagcccgccaaatgcgcggtagagcgacgcttttgtcatcaggcaggcacccgtcacggccatataattctgcgtcgtaaccaggcggtacatgtcacctacggcggtgcgggggtagctcttgtggctgtggcccgcgctgccgttgatgcccatcagcacgcccgcgtgttggatcgtgtcgtcggggtagtagagcttcgcgcccaccgcgcctacgtcgggccgctggctgtagctgagcagctcgcgcaggaagtcggacgacaacacctcaatgtcgttgttgagcagtagcaggtgctcgccctcggcgaacgtcgcgccgaagttgttgatggccgagaagttgaacgcgcccttgtagtagacgacgcggcagtcggcaaagcggctgggcagtgtctcgtaataggcaaacgtcgccgggtcggtggagttgttctcgatgacgatgacctcaaaattgtcgtagcccgcgtttttgtacaggctcgtcaggcagcggtccaggtcgtcaatgtggtctttactggggatcagcacgctgatcttcgggtggccggtcagctcgtaccgcacctgaaatgcgccgggcgcgtcgggcacggccatggcgtggcccggcagaccgagacgcttgagctgcgcgtcgatggcgcgctcccccgccgcgacggcgtagggcttggcctccatgcccgcggcggtggagccggctgcggcacgccagatgtagagcaccttcttgatatgctcgatgcgctgtgctttttctgtcaggcgcaggatcaaatcatggtcctgcgcaccgtcaaactccttcgactcatacgcgcccgccgcgtccagcagcggacggctgaacaccgccagatgcgtgataaagttgaccccgcgcaggtagtcgggcgcaaagtcgggcttgaagtggtagccgcccagctccttcaaatcggcggagagaacgatttcatcactatagacaaaatccgttccggtgttttgtatcgtctgcacaacctcgaacagcgcgttcgggtagagcacgtcgtcgtggtccagcagcgtgatgtactcgccgtgcgccagcgcaaatccgcgggtcgtgttgagggcaatgccgccgttttcaatcggctcatacacaatcgtgccgggcacagccttgggcagacggcgctccagccgcttgtcggcgtcggatgcgtccaccagcaccaattcccagtttgtgtaggtctgcctgacgacgctttgcagcatctcgtcaaacagcttggcgggcgtgttgtacagcggcacgatgatgctgatcttcggcccctgcaggtgcgcggcgcgctgggccttcagctcccggcgcagcggaatgtcggcgcggtgccgccagtcgtcgtggtgcatcgccagcccgacgcggaatttcacatcgcgccagagctgctcggccccctgctcccgcagggtcttgacgctgcgccccgcgagctcccgcaggtgggcggggttcaaaagccgcagcgccatgccgccgacgctgtcctgtacggccaggtcggcagggcgctcgttgttcggtttcgtgttctcggacatagcttattcctcggtgactttggccggcatggcgtcctttttctcaaaccttcggtactcggcggtaatttccttcgtcgcgccgatgcggcgcagatggccgtggtcgagccaggctaccttgttgcacatacgctcgatctggtcaatggagtggctgaccagaatgaccgtcgtgccgccggacagcagctcggccatccgcttttcacacttctcctgaaacaggaagtcaccgacggacaggatctcgtcggcaatcaggatgtcgggcttcgttatcgttgccacggcgaacgccagacgcgcgaccatgccggaggagtagtttttcagcggcacgtcgagaaactcctgcaattcgctgaattcgacgatgtcgtcgaactttgagtcgatgtacttgggtgtgtagcccagcacggtgccgtttaaataaatgttttcccgtgcggtcaggtccatgtcaaagcccgcgcccaattcgatcagcggcgcaatcgtaccgttgaccgtgaccttgccggcgctgggcttgtagacgccggaaatcactttcagcagcgtagacttgccgctgccgttcaggccgatgaggccgtagaaatcgccgggcataatatcaaacgatacatcgtccagcgcgaagaactcgtcaaaccgcacaccgccgtgcagcagcgcgacaaagtactctttcaggctttcgtgcttttccttggagaggttgaagcgcatcgaaacatggtcgatggagatgatgggtttctgctctgccatttcgatgcccccttacatgtacaggacgaacttgtcctgattctttttgaacacccagatgccgaggcccaggctcagcgcggcgcagaggaacgggatcagcaccatgttgggggtcagcccctcgccccacatgacgcaggaacgcacggcggtgatgtaccagtagatggggttcaggttgatgacgtactgcatccagctttccatctggcgcgggtcgtagaagatggcgctgccgtagacaagcagcgtgcaaaagacctcccagatatgcatgatgtcacgcacaaaaacgtagagcgtggacaaaatcagcccgatgcccagactgaaaataaacagcatcgcaaggggataaatggccagcagcacagtcccgatcgagatgtgcgaccaggtcagcagcgcgacgataaacagcgccacgaggctgaaaaagaagttgacgagcgcaaagcagcacttttccagcgggaagatgtatttgggaatatagaccttgcgcagcagcgggccgttcttcagcacgctctccatggccatggtcgtgctctcgcggaagaagttgaacatcagctggccgatgataaggaacagcgggaagtcctcgatgccctgaccgcgctggttgaacagcgcaccgaacacggcccacatgaccagacaggtcagcagcgggttcagcacgctccacgccacgcccagcacgctgcggcggtatttcagtttgaaatcacgggaaatcaggttttgcagcaggtaacggtatttccagaagcctgcgaaggtgtctttcagtttctgcacggtttaccctcaatatttctcaaaatattcgaacttctgggcggcaaacggggtgtgctccttgtccttggcgctggtcttgtgctcgcagccgcagtcgggccactgcacgttgaccgtcgggtcatcgtagggaatgccgccctcggcggtggggtcgtagacgtcggtgcacttgtagcagaactcggccacatcggacagcacgacaaagccgtgggcgaagccctcggggatccagagcatcttcttgttgtcggcggacagcgttgcgcccacccacttgccgaaggtcttgctgttggggcggcagtcgacggcaacatcgaacacctcgcccagggtcacgcggacgagcttgccctgggtgtgcttggtctggaagtgcaggccgcgcagcacgcccttggtggagcggctctggttatcctgcacgaagggtttgtcgatgcccgctgcggcgaactcgtcgatctggtaggtctccataaaatagccgcggtcatcaccaaaaacagtcggctcgatgatctgcacgtcaggaatatcggtcttgatgaaattgaacttgctcatggtttggaatctcctttttatatttcattagtctaatacatagcgatacaggatatattatactctatttcactgcgccgggcaagatggcggaaaaattttgtcgctgctgtaacaacaggacggcttttccgtcttgttaagtgtagggcagatatggtatgatagcccggaaggtggtgtgcagagtgacaaaacgcgaagcccgcgcatgggccaaggcccggcgcacggaactggatatggcttctgtgggccgcggcatggcgcaggcgctgttcagcctgccgcaatggcagagtgccggggcagtgctggcctttgcggccatgccggatgagccggacacggcggaaatactaagacgcgcactggccgacggcaagcgcctgctgctgccccgcgtgcggagcaaaaccgagatggactgggtggagataccggcattgcgcctgctgcggcccggggcgttcggcattcaggaaccgcccgccgacctgcccgccgccgacccggcgggatacgccgcagcgctggcccttgtcccctgcctggccgccagccgcgacggggtccggctggggcgcggcggcgggtattatgaccgatttctggcacactataagggagcggggctgctgctctgccccgaggccctgctgctggacgagctgccctgcgacgactgggacgcacgctttgcgcccgagaatattctgaccgagaaaggaattttacgatgaaaaagctgctttttgcaacagccctgctgaccgccctgttcctgtctgcctgcggcagccaaaaggctgacagcaacgatcttgcaaaccaacctgccacaagacccgaggaaggcgcgaagctggacccggagttcagcgttgacgacgaggataccggtgagaccgccgagccgcagccggacgcggagctgagcgagatggtggatgctatttatgacgtccagccggttgacctgatgggcatggagacggtggccatcgacctgaccgacgagagctggtacggctatctggcggggctgaccgcggacaatgtggacaaggtggatgccgcagtagtcagcgagccgatgaccggaagccaggcgtacagcctggtgctgctgcgcctcaaggacaaggccgatgcccgcgagatcgccgattcgatggaggaaaacatcagtatgcgcaagtgggtctgcgtggaggcagataaggcccgcgtggtcagctttgatgataagctgctgtatgtcatggcagacagtgagctggtcgatgccgatctggtggcggatgctgccgcaaaggcctttgatgcgacatttgatgtcgatgattccctcgtcaatgaggacgagagtgagctgcccccggagctgctgtccgccccggctgtggcagactgagcgatacaaaaaaacaaagagccgtgccctttgcggggcacggctcttgttgattacaggcggaatcaggccttggcagccttgatctccttgatcagctcgggaacgaccttgtacagatcgccgacgatgccgtaggtggcaacatcgaagatgggggcgttctcgttcttgttgatggcgatgatgttctcggaatcctgcataccggcaacgtgctggatggcaccggagatgcccagtgcaacgtagatgcggggatgcacggtcttgccggtctgaccgacctggtggtcggcagacagccagccctcatcggtgacggcgcgggaagcaccgacaacaccgcccagagcctcagccagctcctcggccagcttgatgcccttctcggggtcagcggagatgccgcggcccacggagacgacaacgtcggcaccgatcaggtcaacgagcttctcggcgctcttcttgatgtcgagcacctgaacatggatgtcgtccgcggtcagagcgggagtgacgttctcgacgacgaccttgtcagcaccggcctgatcgaacgcctgcatctgcatgacgccggggcggacggtggacatctgcgggcggaagcgcgggcagatgatggtagccatcaggtggccgccgaaagcggggcgggtcatcttcaggttggtgttctcctcaaacttggtgttgtccacatcaatgttggaggtggtgcgcaggaagttcttgtacttctcgacatccacgtccaggtgggtgcagtcggcggtcaggccggtgtgcagacgggctgcgcagcgggggccgaggtcgcggcccaggttggtcgcaccgatcagcatgatctcgggcttcttctccatgatgaggtcgcacagagccttggcatagccgtcggtggtgtagtccttcagcagggggctgtcgatgttataaacgcggtcagcaccgtagccgcccagcgccttgacatagtcctcgttcagctcactgcccataacaacgccgcaaagctcaacgcccaggtcgttggccagtttgcggccctcgctcagcagctgatagctgatggtctggatctgaccttcacgctgctcgcagaatacccacacgcccttgaaggcggcggtgtccattgcattgaattcagccattgttcgtttctccttcctcaaatcaggtgcttgtcgttcaggatgccgaccagctgggcagcatcctcgaccttcatgccggcgcccttgaccggaggagcaaaggacttgtaaacgttcgtcggggagcccttcagaccgatggtgtcggtctcgatgagcggatcgtccttcagagcgttgtaatcaaagacctcaagcggcttgtcgtagcactcgaagataccggaaacgctcatgtaacgcggagtgttcagctccttgatgcaggtcagcaggcagggagtctggaccttcagctccatgtagccgtcctcaagctgacgctttacggtcagggcgttgccgtccttcttgatttcggtgacataggtgacctgaggcagatgcagcttctcggcgatctgggggccgacctgagcggtatcaccgtcgatggcctgacggccacagaaaacgatgtcctcggggccgacgccgatcttgttgacggcagcggccaggatctgggaggtagcgaaggtatcggaaccgccgaactcgcggccagagaccagcacgccgcggtcagcgccgcgggccatcagctcacgcagcataccctctgccggcggcgggcccatggtgacgacgacgacctcgcagccggtctcgtccttcagctgcagggcggcctcgacggcgttcaggtcgtcggggttggtgatggtagccatggcagagcgatccatggtgccgtcagccttgacagcgaccttgccctgcgtatcgggaacctgtttgacacaaacgattgctttcattacgtctgtcctccttacttcagcagcgcgccgccgatgaccatcatctggacttcgctggtgccctcgtagatctcggtgatcttggcatcacgcatcatgcgctcgatggggtaatcgcgggtgtagccgtaaccgccgaacagctgcaggcagcggcgggtcacgtcgctggcggtgcgggcggcaatgagcttggcctcggcagcctcaacgctgtagcggaccttctggccgtccatggcagcctgcttcttctgggcagctgcgtagaccagatacttggcggcgtcaacgcgggccttcatctcggccagctcgaactgggtgttctggaactgtgcgatggagcggccaaactgcttgcgctccttgacataggcgacggtctcgtcgatggcgccctcggcaatgcccagagcctgggaggcgatgccgatacggccaccgtccagcgtagccatggccagctggaagcccttgcccttcacgcccagcagacgatccttcgggatgatgcagtcctccatgatgagctcgcaggtggaagaaccgcggatgcccatcttgtcctcgggcttgccgaccttgaagccgggatcggtgcgctcaacgatgaaggcgctgatctccttctgcttgcggccgcgcttgtcggtgacaaagccggtgacggcaatgatgatgaacacatcggcaaagcctgcgttcgtgatgaagatcttggagccgttcagcttccagtggtcgccctcgtcaacggcgaaggtctgctggccctgagcgtcggtaccggcaccgggctcggtcaggccgaacgcgccgacccactcgccgctgcacagcttgggcaggtacttggccttctggtcgggggtgccgttctcatagatgggagccgcgcacagagaggtgtgggcagacaggataacaccggtggtgccgcagaccttggacagctcctcgacagccatgacgtaggacaggacgtcgccgcctgcaccgccgacggacttcgggaagtagatgcccatcatgcccagcttagccatcttctcgacggtctccttggggaagtactcctccgcgtcgaccttcttggcgaggggcttgacttcgttttcagcaaactccttgtacatcttctggaccatttgctgctgtttagacagagtaaaatccattgataaaacctccatatactggggccgggctatactgcccgaccaaacaaacgcggcccggcacggttttggccgcgccaggcgcgtaagtcactgaattacagggcgtcgacaggggtcttggtgcggtctgcgttgtaaacgtagaagcccttgccggtcttgcagcccaggttgccgccgcgaaccatcttacggatgagcgggcaggcgcggtacttgctgtcgccggtctccttgtacagaacgtccatgatagccaggcagatgtccagaccaacaaagtcgcccagctccagggggcccatcgggtggttggcacccagcttcatagcggtgtcgataccggcgatgtcggagacgccctccatcttgatgaaggcagcctcattgatcatcgggatcaggatgcggttgacgacgaagccggcagcctcattgacctgaacgggggtcttgccgatctcaacgctgatcttcttgatggtctcgacggtctcggcgggggtgttcacaccggcgatgacctcgatgagcttcatgcggtcagcagggttgaagaagtgcataccgaccagaggacggctcagacccttgccgatctcggtgatggacagagaggaagtgttggaagcgaaaacgcactcgggcttgcagatcttgtccagctcaccaaaggtggtctgcttgaccttcatatcctcgaaagcagcctcaacgatcaggtcgcagtcagcgcacagatcctctttcaggccagcggtgatggcagccatgcggcggtcaacctcagcctgatccagcttgcccttggcaacgagcttggcataaccggcagcgatcttgttcttgccgccatcggcccactcctgcttgatgtcgcacagagcgacggtgaagccctcaacctgtgcaaatgcctttgcaatgccctggcccatagtgccagcgccaataacgcctaccttcatagtaagtacctccaaattatgttgttgcggggctgtaggggcgggtgcacgcatccgcccgcagggcgtcggggacgccgccccctacaagattgtagttgaatttagttattcgtgaaaaccggcttcggtttcggtttctcgcggctcaggaagcagcccatgccctcgacctggtcgtgggtctcgaagcagtcgccgaacagcttttcctcgacctcaacggccttctcaatgggcaggctgatgccgtcgttgatggccttcttgcagttgcggaccgcaatgggagcattcttggcgatcttgccggccagcttcagcgcagcgggcatcagctcctcctgcgtgtagacggcgttgaccagaccaatgcgcagggcctcgtctgccttgatgttcagggcagagtagacgagctgcttggccatgcccatgccgacaaggcgtgccagacgctgggtgccgccgaagcccggcgtgatacctaagcccacttccggctgaccaaagacggcattgtcggagcagaggcggatgtcgcagctcatggccagctcattgccgccgcccagcgcgaagccgttgacagcagcgatgacgggcagcgggaagctctcgatcatcaggaaaacgtcgttgcccagcttgccgaaagcctcgccctcggccttggtcatcgtggacatagagccaatgtcggcaccggccacgaagctcttgtcaccggcaccggtcaggacgacgcagcggacggtgttctgatcgatggcctcaaaggcggccttcaaatcagccagaacctccgggttcagcgcgttcagcgccttcgggcggtcaatggtcaggacggcaacggcgtcctgaatctcagtagtaacaaaggacattgtgtattcctccggtaattacatttcaacgatggtggcgcagcccatgccgccgccgatgcacagggtagccaggcccttatgcgcaccgcgatgcttcatggcgtacagcagggtgacgaggatacgggcaccggaagcgccgacgggatggcccagcgcaatagcgccgccgttgacgttcagcttgctctggtcgaagtgcagagcctcgccgacggcaacagactgagcggcaaaagcctcgttggcctcgatcagatccatgtcgtccacggtcaggccggtcttggccatgaccttcttggtggcggcgatgggacccaggcccatgacctcgggctcaacaccggccagagcaccggcgacccaggtagccagaggctcaacgcccagctccttggccttctcctcgctcatgatgaccagagcagcagcgccgtcgttgatggcggaggagttggcggcggtgacgatgccgtccttcttgaagcagggcttcagcttgcccagaacctccatggagctcatgcgggggccttcgtcggtatcaaacacggtgtcgcccttcttgcccttgatgacaacgggaacgatctcgtccttgaaagcaccgtcggcaatagccttggcggccttctcctgagaatggaaagcaaactcgtccagctgctcacggctgatggggttgtagccgtacttcttctggtaggtctcgttggtgcagacattctcggcggtcatgcccatgtgcatgttgaagccggtggcatcccacagagcgtcgttgaccatcgtgtcgaccagctcgctcttgcccatgggggagcccatgcggtagccgtagcggcccttcatcatggcgaacggagccatgtccatgttctccatgccgcctgcaacgacgatgtcggcatcgccggcctcgatcatctgggcagccatgttgacgcagttcagaccggagccgcagacgacgttgacggtgacggcgggggtctcgatgggcaggccggccttcagggaagcctgacgagcgacgttctggcccagaccagcctggatgacgcagcccatgtagacatggtcgacctgctccggcttgacgttggcgcggttcagagcctccttgatgacgatggagcccagctcagcggcggggacattggcgagggtgccgccgaacttgccaatggcagtacggcaggcgctggcgatgacgatctttttcataagtagcctcctaaaaattctctctttggatggactattgagtaacaatttattttcaggccgacggaagacgcggcttgaatgcggttttacagctcccctgcctcgcgcttggcaatgagcgcacgctcaacgttgcggggcacaaagcgggaaacatcctgcccgtagtgggcggcctcccgcacgatggtggaggaaagataactccacttgatggctgtggccaggaacaccgtctcgatctcgggcatcatagcgaagttcgtgtgggccagctgaatttcattttcaaaatccgtgaccgcgcgcagaccgcgcaccatgacggtagcacccttctgcttggcgaaggtgaccgtcagcccgttgaaggagtcgatctcgacattcgggatgttcttgcaggactcccgcagcatggcaacgcgctcctctaccgtaaaaagcggggtcttggcgctgttgaccagcaccgcgacgatcaccttgtcaaacatacggctggagcgcttgataatatcgagatgcccgttcgtgacggggtcgaagctgccgggatacatggcgatggtgggcat

SEQ ID NO: 1150 - DNA, 21236 bp, unidentified
  source 1..21236: mol_type = unassigned DNA
gtaaccgactgataattattatcctgcggcgtaaacacacccgatatctcatgttttccaacatcatactctttggcatccgtagaaaaggtaaattcacctgctaccttttcgccggtaaccggacttacatacatcaagtccggatgaattttcattaaattctgaccggcaaaaatctgtacttctttttcatcctgtcgtcttgggataacagcatttaccgttactttcccgctctttgtaaagaataaggaatcatacgtcatcggatatttcggcacaaatacaatatcctgattggatgttcccgattgtgggactaagtctcctttcacaaactgccacgttccctcaaccggcattgaccacgtaactttatcctcaggaatctgtgcctctttcagtttctgaccgtatgaaatactttttgcttccaaacaaatggatgtgttatttttatttacagaatacgattttttaatcatacgtcccgctaacaaatcgattttaccggaaccatataatattccatccgaattttctaaatccactgttcctccacgaatctgcaaaattccatccatttgcaatcccttcttaccaatggtcaatgtgaccccttcatccactacaagaatagtatctttatttatcgcatcatagtggataaagtcaggaaagtcataataaatatctctttccaaagtaattactcctccacacatcgaacaacactgcaacgcaacatctaaactatccgtatagcatccctgctgtcctttcggcacataataaatggagccagccgaagctgctttcaccatttcctttggcatcgaaccatatacacacaggcacacaagcacccatgcaattacttttttcatttttaaattcatagacagtcctccctcttgtctttttatatcatgtaaatagctgcgattctcatttaccagataaacagataaaatgaaattagattcaccagacaaacaccacgctgtctgataaagcaaaagcagtgtttcccctgcgcatgagaaacactgctttttgctgttccttccgaaaggaactttattgtatcacgtgatattttactcgtcaattactttttttacaaattatgggcgtacaacgaccggaatttcgctctttttaaaaacgcctctgtctcttattacaacattattataggttgaactactctccattgtcttaccatttccaatgtaaactgcaatgtggtatattcgcttataccgtccgtttcttcttgccttcgagccgccaaagcaaatcaaatctcccggtctcattttcttttcagaataggttttctttgccttaatggactttccttttctcacataatagtggccgatgtccgccgccaccggcgcccagcttgttttgcagacaagatatcttcctaccgcacgataggttcggtaaacaaaagaggagcagtcataatagtttttatccatccgccttgcctgactgtactttttctttcctatctttttataaccataccgcatcgcccggacagccgttttcgtacttactgccagataatactttactgtctttccatcgacctcgcaggaaatcacagcacttccatactttttcgttgtcacctttcctgaagctgtcacaacagcaacctttacatcggacgaacgaaagaccggacggctttctgcatttaacccagtcaccttgaccgccagttttttctttttctgataaaaaccatatgccttttttatttgcgggtttgtaaccgtaatcacacattctgtctgaacgccatctacctgtgccactacagtagtagaaccaacttttttcgccttaactacaacgcccgcctgattataggaaacaatcgaaacaatggaagtatcccttgtctgataaacaaccggatttcctgcaacagattctaacaaaagtgttgtctgacagcccttcgctaaattctgcttttggattgtaaattggggctgcaaaatttcaacaccaagcacaaaagagtacacaccgccatatgaatccgtaaccgtaacagaaaattctgcaaagcctgcgcgaaccggcgtaataattccctcctgtgtaactgtggctgtttccggcgttcttgcctgccacacacacgtcatcgattcaaactgcggtatcggcagctgaaaagagccaccacccaaaggatgtgccgtaaacgactgtctgttaaaactcaaatccgaaagaatctcatttttctttacttcaatttctgcatagtcaactgtctccgccttcgttttcacggaaatcgtaaccgtacctgcaccaatcgtcgtaacaactttgtttgccgacacctcaaccacatgctctttacttaaaaccacttccccttccggcaaatccgcaagagtaatcttttgtcctaagtagagacaaatcttttgtgtcgtctcctttgcctgcacataattcgtctgattcactccggcaaatgctagggcaaacagaagaaataacagtgcaaaatatcttttgctgcttcgcatttcctctcacctttctttgtaaatttttatatttatctttcctcaaatcacagaacaaagactacacgatagcagaatcttctgtcatcgtgcagtctcactataaaaccacactgtgtcatttttatttcacttcaattttttctttaccgcccatatatggctgtaatgctttcggaatcttaactgaaccatcctcacataagttgttttctaagaacgcaatcaacatacgtggtggtgcaacaaccgtattatttaaggtgtgggcaaaatacttaccaccttcaccgacaacacgaatcttcaaacggcgagcctgcgcatctcctaaattcgagcagcttcccacttcaaaatatttcttctggcgtggagaccatgcctctacatcaatcgatttcactttcaaatcggccaagtcaccggaacaacactctaacgtacgtaccggaatatccaatgtacggaataaatcaacggtgttctgccacaatttatcaaaccacattttactgtcttccggtttgcagacaacaatcatctcctgcttttcaaactgatggatccggtaaacaccacgttcctcaattccatgagcacccttctccttacggaaacatggagaataactggtcaaagtttttggcaactgctcctccggaataattttatcgataaacttaccaatcatagaatgttcactcgtaccaatcagatacaaatcttcaccctcgattttgtacatcatcgcatccatttcatcaaacgacataacacctgttacaacatttgaacgaatcataaacggcggcacacaataggtaaatccgcggtcaatcataaagtctcttgcataggaaataactgcagaatgaagtcttgcaatatcgcccatcagataatagaatccatttcctgcaacgtcacgtgccgaatccaaatccagtccatcaaatgattccataatctgtgcatgatatgggatttcaaaatccggaaccaccggatcaccaaacttctcaatttctacattttcagtatcatttttaccaattggaacactcgggtcaatgatgtttggaattaccatcatgcgcttattcaattcctctgcaatttctacctctcgtgcttctaaatcagaaagttctttggcataaccggcaacctcttccttcattgcctcggcttcttcttttttgccctgacccatcagcgcaccaatcatctttgaatttttcttacgaagagcacgaaggtcatctgctttctgctgtgtctcgcgacgctctttatcaagcgcaatcacttcatccacgagtggcagtttgtgctcctgaaatttatttttaatgttttgttttacaacatcaggattttctcttacaaatttgatatctaacataattttcttccttccatatctttctcaccggtcatcctgtcccgccggaattttttctatggaaaattatacaccacttttttcttccttgcaatgcttttccacccattttccacgcaccaaaacaattccaaccggcagcaaaatcaaactaattaactgcgaggtggaaaaaacactgatacttcctctgattttatccccgcgaagcatctctaacaaaaatctggcaatggaataataaatcaaataaattcccatcaaccgtccatttctcaaattctttttcttcataaggcaaaataaaataccacacaaaagaaaattcataagcgcctctaaaagctgcacggggaaacgcggcacctgacttaattgcggaacagcctcattatacggaaactgtatggcaaaagggccatagtattcaatgccataacagcacccggaacaaaagcatccaattcttccgataccgtgaacaaatggaatcaatggtgcaaacacatccatatacggaacataggataaatgatactgcttacagtaacaaaagatccccaaaaaggcaccaatcaggccaccataaaaaacaagcccaccaaacaaataattcattaaaaataacagtgtctgcatgaaatttttatcaaaaccagccgcaactgcatcccatttctgtatcaggctcggaagccttgtcaagcaatacaacagtttagagccgataagaataccaatcgccgcatagatggcaccatataaaacatcctccttggccagacgatagcggcctgctatttttcttgctataacaatggctataaaaaaacctgccaaaaaaattgtgctataagttggaatatctgcaaatcctaaatgaattgatggaaacattttctcctccttagaaaaaaaggctgctgcctaagcagcaaccttctttattttggttatattgttctcttagttgtaagcatctgacaagtcgttcaatgcattgctcaagtcatttaaactatctgctgcatcattaacatcactgcttactaaacaggaaccaccaacgcatccataacaagtataacttgttttggtactgctggactcaacagcaccacagattgaacatcctactgcaaaaataacagcaaagataataccaatcaaaccacagacaaaacagcctgaccttttgtgcctcctgtctgtttttttgcattaataccgagaacaactgctacgatacctaaaatcaaagcaattgcggcaccaattacaccaaaggtaattcctccgatgacagcgattactaagctcacaataccaagaatggtagaagctgttgctgctccgtttttctgttccataaaaatatcctccttcctcaattatttatcccataaaactccctataacaatttatattctaccataccaatatattccaagcaataaaaattttgacaaaaaaactacatattttacatttttttcatttaccttaactatttcgcataaaaatatatatatacaaaaaagaagcagtttcggtcaatcccgttgctgcttctttttcatcccattattaatttttatcgtttcccgtcacatcatcaacggcgtcatccacaccgtcaattacgtcgtttacaccgtcagcagcatcatccacgccgtcttttacatcatccgataaatcgttatcatcgtttttgttgtcatccgtcgcatttggcgttgctgtgttattattttcattcgttggcgtctgtgtcgcttcatttgttgcttccggggaagcagatgggtccgttgcgctgttatttttattgccgcacccggttaccatagcggacaaacaaacaacaagcattgcaaaaactactatttttttcattgaaatatcctcactttctacaaataaatcgtttcttacaatgctattgtgacccattttattgtttttattcgtttgtttttatttgaaaaatttttcaatttcttccggtttatcgacaatgtaatcggcaccatgctcttctaaaaaagttcttccccgaaatccccagctcacaccaatgcagtccatttcactggcttttgctgtcgctaagtcaacatccgaatcaccaatataaacagcatttttcttatcacaccgtaactctgccaatgccttataaaccatatccggtgccggcttttttcggatccccatttcttccatttctccgagtgccacatccagcagattcggaaaataaaccggcatcaattctttaaccgcaaaatccgccttatttgatacaaccgccattttcacaccctttttctttaaattttgaagaagcgcaagaacccccggatacagtgctgttttgtcatggcagtgttctgcataatattctttaaaatcagaaagtgcctgctcaaacaccggattatccttaccggatggaaccgcacgctccattaactttacaattccatttcccacatactgacacacctgcgtaattgtacaaagtggcattttattttttttaagtgaataattcacggcgtccgctaaatcttctaatgtatttaataacgttccatccaaatcaaaaactgctgtctgatatgtcatattctttcatcctttctgcattcgctccaaattacgcacattgtaccactctcttttggtttgtgcaagttgacatttgcccggctaaatgctaacataaatgtaattgttcaaaatcgattttgagcacttacatttgatgtacgaatttatttttggaggaaatgacaattatgaaactagacaaattagtaggcgaacgcttcaaagaaaaaccaagcgattgcgtcgttgaaagtcatgcactgatgatgcgcggcggctatatgaaagatgtagccaagggaatttactcacaatttaccccattaaagcgcatttgccagaaaatagaggcgattatccgtgaggaaatggatgccattgacggacaggaagttttgttcccggttgctcttccggcatctttgtgggatgagtccggacgttacgaaagtgtcggcagtgagcttttacgttttaccgaccgcaacggctcaaaaatggtcttaggaatgactcacgaggaagctgccgttcagcttgtccgcgattatgcaaaaagttataacagttatccttttatgatttatcagattcagactaaattccgtgatgaagcacgtccacgtgccggtttaatccgtgtccgcgaatttactatgaaagatgcttattctttccacacttcacaggaagacttagagcgttattatcaaatttgttataatgcttataaccgcatttttgcacgtgccggtatcccggaagtagttaccgttgcctccgactccggtatgatgggtggaagtctttcccatgaatatatgctcttaacaccaattggagaggattcgattgccatctgttccgattgtgattaccgtgcaaatatggaagctgctgaatcagttattgaaaatacgaaagatgcagtcgatgaaccactgacaaaagttcacacacctaacattcacactattgaagaaatttgtgattttcttcattctccattggagaaatcgtgtaaagctgttgtttaccagaaaaatatgacagacgattttgttgttattttcatccgcggtgatttagatgtcaatgaaaccaaactgacgaactatctcggcgaagaagttcatccggctgtaattacaagtgactgtggtctgaatgccggctatatcggcccggtaaatcttaccgtaaatggcaactacaccgtgctttatgacaaatcacttcagggaacaaataatttatcctgtggtgccaacgaagaagaatatcattacacgggactctgcatggagcgtgatgttgtcgatgccgaatatgtggatttagcaaaaatcgttgatggcggcatctgcccacactgtggtaaaaagaccatccacatttcccgcggtattgaagtaggaaacatcttccagcttggaacgaaatatacaaaatccatgaatatgcagtatttggatgcggatggcgaatcccattatccaattatgggctgttatggtattggcgttggacgtcttgctgcttctgtctgtgaagcacatcacgatgactacggtccggtatggccgattaccattgccccatggcaggttcacctgtgctgtctgcgtgcagacgatgccgaagcaaaagcttttgctgatgaattatatgcaagtctgcaaaaagaacacattgaagttatttatgacgaccgaaacgtccgtccgggtgttatgttctctgacgctgatttacttggtgttccaatccgtcttgtagtcagcccaagaaatatgaaagaatccgttgttgagctctcaagccgtgataaatccgtacaggataaagttgcacttgctgatgttgtaccagcagtaaaagaattgattgctaagatgacaaaagaaattgaatcaaaataaccaaaaaatgaagccggtctgcgaaaaagcgaaccggctttttttcataataaattcatttactctccacgaatctgtgctacaaaatactcctctgcttctccctttgtcatttcaaaaggaattgctaattcaccaaacaaattatcctctgccatatgcagataacgctcatcacttgttgttgctttttttcctttttgtaatctggcctgatttctctgataagacgtcttaatcagtttaacccactgtctgctgtcacaggaacggagtgcctctttgtacacctcttcccgcttcttatcgttctctacccagagtgtctcaatttcgtcccactcttttaataatgtctctgcttcttttttcgtcataaccggacgtgttactactctttttccatccgttggtacaaacagtttactgcccgaagtataaatcggaaccagcgtataatacgtgcgctgtggggcaccatctatgccatccatattttgaatcgattctacccggcagactccactattcccatgcactacatagtctcctatttcaaacaagtctatccatcctttctgccgactgcgccacgactataagaggcgcttatattttccgtctacactattagtataccaccttttttctgttatcgtaagattttttttaatttattagtgatattcgtttgggataagtgtttaatggttgttttttagggtccgtaaattaataagaaatgtttgtgtttcgtgggcgctcccgctaaacaaacgcgtaagggtatcggcatgccaaccacgcataccagatacccactaaaaattagttaaacattaggacgttttgttggcatattcctcctctctcttttacagaagtacgttcgaacaatacagttaaaatagaaaaaaagaaattcaattggcgagagactataatgtgaaacattatcctgtctcgagacaaatgaatttcttttttctatttttaaactatattatttcgacgccttttacttagcatccgtacacataaagctgatttctgcttctgctgctaatttaccatctactgttgcaactgctttgccaatgcccatcggtcctttgcatttaataatttctgtctctaagcgcagacggtcgcccggaattacctgctttctgaatttggcatttttgattccgccaaagaaggcaagtttccctttgttttccggaaggcttaatactgcaatcgcgccaacctgagccaatgcctcaatgattaacacacccggcattaccggctgctgtggaaaatgaccctggaaaaatggctcgttcatcgttacatttttatatcctaccgctcttactcccggctccatctcctcgacgcagtcaaccaagaggaacggataacggtgtgggataatcttttgaatatcgttgatatctaataacatttcgtttttcccttccgttttttattctgcaaatgccttgaaaatcaatacagcattatgtccaccaaatccaagagagttactcagtgctacatcaacttttgtttcaactgcctctttcggacaatccaaatcacattccggatcctgatttacaagaccaatattggcatgtacatagttttccataatagattttacacaagtaattgcctcaacaccaccggcagcaccaagcagatgtcctaccatggattttgtcgaattaactttacactggtaagccgcatctcccatcgcaagtttaattgccttggtctcgaatgcatcattcatgtgtgtgctggttccgtgtgcattgatataatcaatatcttccggtttgatgcccgcatctttgattgcaaactcaattgcttttgcatcgccgcttccgtcgtcaatcggcgctgtcagatggtgtgcatcactcgttgcaccataaccaacaacttctgcgtaaatatgagcaccacgtgctttggcatgctctaattcttcaagaactaaaataccagcaccttcacccataacaaatccgccacggtctacatcaaacggaatcgaagctcttttcgggtcatctgttgtattcaacgcattcaatccggtaaatccggcaacaccaagctcggtaatcgcagcttctgagccaccggcaaccataacatctgcctcaccatactggatggagcggaatccctcaccgatacagtgagtacctgttgcacaagctgttaccacgttgatatttttaccttttaatccaaactgaattgaaatatttccggctgccatattggaaatgagcatcggaatcataagcggagctacacggtttggtccttttgtcaaaattttctcataatttttctgcacacactgaagacttccaattccacagccgacgctgcatcctaccataaatggatcttccttttccatatccagcccactgtcttcaagtgcctcttttgcagctacaaccgcatactgtgcaaaatcttccatacgtcgggcggattttttatccatcgcaatcgtcgggtcaaaatctttaacctctgctgcaagatgcgctttgtaatccgttgtgtcaaacttcgtgattggtccgattccaacggttcctttttttacattttcccaaaaatcttttacattatttccgattggggttactgcacccataccggtaactacaactcgtctactcattctttcctccattcattctgttacatcgcaataccgccatcgacacacaatacctgtccggtaatgtattttgcacggtcagacgctaaaaatacaactgcttccgctacatcttctaccgtaccaaatgcaccgagcggaatcgttttacatgcttcttcttttaccgcatccgaaagcttgtccgtcatctctgttgcaataaatccaggtgctactgcatttactgtgataccacgggatgacaattcttttgccgtcgctttggtaagaccaattacaccggctttggaagcggaataatttgcctgtcccatatttccgataattccagaaaccgatgccatattgataatatgcccctgacgctgtttcatcatcggacgcgtcacaaatttaattccattaaagactccggcaagatttgtctgaataacatcctgaaattcttcctcagacatcttcataatcagattgtctcttgtaattccggcattatttaccaaaatatcaattcttccatattcttttaccacgccgccgaaaaattctttcgcctgctcaaaatcgctgacattgcactgaatggccttcgctttaccgccatctttttcaatctcagaaacgacctcgtcggcacgctctttggaaccattataattaacaattaccattgcaccttcgcgggcaagtgcttttgcagttgctcttccgattcctctgctggcaccggtaacgactgctattttgtcttgtaataacatactgcctctctttcataaagcactatttgagcgcttctacaaccttgtcaatatcttccattgttgccacattatatgtagtcagttccttgccaatggctttggctattttcttattaaatcctgccaatgttcttcccggtccaatctcgataaaggtatcaacaccgttttctaccatcttttccactgactgctgccagcgtaccgaatggctgacctgacttacaagacgaggcataatgtctgcctgctctgtaatataggaagcgtctacatttgccacataaggaatctgcggtttttcaatcgtaagttcttttaatacagcctctaatttttcaccggctccggtaagaaggcttgagtgaaatggtccgcttacgtttaaaagaacagctctttttgctccggcttcttttaatttgtctgctgcctgttttacctgttcagtctctccggaaattacaatctgtcccggacagttatagtttgcaacctgaactttatcaaactcttcaatatttttatcaatctctgcggcatccataccaagaattgccgccataccgccttttccggcaggcacttcttcctgcatgaaaataccacgtttacgaactgcttttgcagcatctacaaaattcatagaacctgctgctactaacgcacagtattcaccaaggctaagtccggctgccacatccgcctttacacctctggttttcaattcttccataattgccacactggttgtaagaagacatacctgcgtaaattctgtaatattaatgtcgttattttcttcaaagcaaagtgctttcaagtccaaatcaactgccttagatgcttgttcaaacacatcttttgccactgctgaattttcataaacattttgtcccattcctaccacctgtgctccctgtccggggaagacaaatgcaattttacccatagttctatcctagcctttctttcgtcattttctcatcattggtgcatatacattgcactctaaaacattgacaccaagagaagcggactatgtcaaactttcttggtgtcaatcttgacctgtttatcaggttatgtgcaattgttttactctacacctttgctctttaagaaattaattacgtcgcctactgtgttgatgctttccaaatcatccgtaggaatctcaacatcatactcctcttcaagagccatgatcaattcatagagatcaagagaatctgctcccaaatcatctttgaaagaagatgcttctgtgatgctgtctgcatctacgctcaactgatctgcgataagttcctgcattttttctaacataatacgatttctcctttttacttaaattctttttattcgttcaaaattatactttgaatcaccatgtattgtagcgtatccacatacgtttgtcaagatttttccatttatataaactggagtgtaaaacaaaccactgccgccaaggtaagcagcacataaaaaacgattgctttcttcctctccggataggctttcagggcatttaaaacaaacagcacaataacaattccaagctccgtttttaacatccagcccttattcatccccatgcccacatcgataatgataaagattaacaatatggcagtcagtatactttgtaaaatcatgagcactttttctttctgtctcataagcccccacgcgcctgccatatcctgcgaaaattttctatctgccatttatttcccctttcttattgaaactgcctgcatccactttactgtaaatgcaggcagttcgaaaatagtatacaaaatagtatattgtaaacaaaataaaggaagcttcgaaagggacttgaaccctcgaccccttcattacgagtgaagtgctctaccgactgagctatcgaagcacacggtgtataaccgacagaatatataatacacattcctaatttttttgtcaagtaattcattcatacttttggtcatttttttcaaataagcaaaaacacccaccggcacataaaaagcaagtcctgcctctcatgcaccggtggtgctctcctaatcataataccttacattacttagtaagcagcatcataatctcattgcttcgattaataaactctgtcatcttatctgcctgcagtggctgatggctaatcattgccagatcataaagctgtttgcagaacatatcgctgtgctcgccatctttgttcgccagcagatactgaaccaaatcattgtttgcattcagaactagtgtctgtccgacatccggcagttccataccgcccatgccatttgcggaatacatcttcatcatatcctgcatccttctggcctcttcagacaaggtaatcatagaagaaactttatcatttttcaatttctccactttaacctctaattggtcttttccggttgctttacggaacaattctttcaaagtctcggtatcttctttcagtttttcctcatcgccttcttctttgaaagcatccgtcaaatctgcatcaattctctggaatttcacatcgtcatcgccggcttccaatgccgatacaaacggctggtcaatattatgaagaagaacaaccgcattcatatcctgctcacggaacatcttcacatactggctctgctgctgcaaatcggtaacatagtaaacaatcttctttggtgcctctgtctcttctgaagatttctcatcctctttgccctcttcgaccacttctgcctctacttccggctccggaattgtctccaaatactcttttaatgtgctgtatttgtcgtccaaatccttgaacaaaacataatctttaattttctctttgaacttctcatctttcaagcagccaaatttgataaacgggctgatatcatcccaatatttctcgtaattctcgcggtctgttttgcacataccggaaagtttatctgccacttttttcgtaatataatccgaaatcttcttcacaaaaccatcattctgcaaagcacttcggcttacgttcaatggcaaatccgggcagtcaataacgcccttcaacaacatcagaaattccggaattacttccttaatattatccgcaataaatacctgattgttgtataacttaatcataccttcaacattctcatactccaggtttactttcgggaagtacaagataccttttaagttaaacggataatccatattcaaatgaatccagaataacggctcacggtaatcattaaataccttacggtaaaatgtcttgtattcctcttcggtacactcatttggatgttttgcccaaagtgggtgcgtatcactaatggataccggacgtttcaaaattttggtctttttaaccggctcttttgcttcttcgccctcttttttgtcatcctcttttggctcttccacaatttcctcaataaccgtatcttcctctgtcacttcctcgctcggaattgtctcatactccggctcagcatttgcctttgtaaggaaaatttcaaccggcataaaggaacaatatttatcaagcacctcacgaacacggtattcgttggcaaactcgtaactgtcctcatttaaatgcaggataatccgggtacctactgtatctttatcggatggtcccatctcgaacgtcaaaccaccgtcagactcccaatgaaccgcttccgaaccttctttataagaaagggtatgaatttctgcagagtccgctaccataaatacagagtaaaagccaagaccaaaatgtccaataatctgctcttcatttgctttatctttatatttttccaagaaatcagcagcaccggaaaaagcaatctggttaatatactctttcacttcgtctgccgtcataccaagtccattatcggtaaacgtaattgttttatcttccggatttacttccacctcaattttagctttgtaatcatccggcagagatgcctcactcataaggtctaattttttcaatttcgtaatcgcatcacaagcattacttacaacttcacggataaaaatatcatggtctgaatacaaccatttcttaataatcgggaatatgttttctgaattaatcgctaaatttccttgttcattcgtcatgttatcaacctccaattagtaattcaatcttgttctaacagatatgataacgctgtcacaatcgaatgtcaaggaaaatttagcactcattcaaattgagtgctaacaatttcatgtttctttataaattgcagacaattgtcatcccacgcctgctgcccttttttatccagagaaaactccttttgcatatatccggtcacaaactgaagtttttccttttcatagcggatttgaatcgatccaacatctccatttggcatgtaatgacaaaaatcaaacaacatcttctgcggcactttatttccttttatccacgaaaaaacaaatgttttcatcatattccatgtaaccagaccggtttcatctgtccgtttttcatcactgtcaaaccaatcatcaaaacatctgccgtcaatatgaaacgtggcaaatgttgtcacctcgcaggaacgcagatgaaaccggtcaaacatactgccctgaaacatatgctgcataaattcttttacgctgtcaatttccaatacaatcatttcgtatattatccttcctaactgctcatactagcattgttacaaagtaacctaaattcaccgatatggtgaaagaatggaggcagattatgcgtgcagatgagcaaacttaccgcgatgtagccaaaaactgtagtgcctatgaagtcaaggactgctgtagctgcagcaacaaatccggcaatgtcaatgtttcctgcgtaacatgtaaacattttacgtctgacaaacattgttctttggacttgttcgatccaatcgtggaaaaccacaatctttaggcatttttatgcccttttgccgggattttcttcttatcggaagtcccggcagtttttttaaccggtacattctcaaaaacagcaattgagcgcggcgccagctcatatttctttccatccactgccatttccatagtatttgaagtatcaaatacccgtttccattctttatttttttcaatttccgggagataaaatacatgtggctcccagtgaaaattaaatgcaaaatacaaggaatttccgccataatagccaccgaaaaacaaaacaccaagttccctgctataataagaaaacctcgcattccacggctctactccgtgacaggatacatccggcgcaccaagcccctcagaatccataccggtcagataccgtctgctctgatagagaggatgattcctacgaaactcaatcaacttttttacataggaaaataattctttatttttctctagcaaactccagtcaagccatgtaatcgcattatcctgacaatatgcattattatttcctttttgtgtatttccaaattcatctcccgaaagaattctcggtgatgccataccaagcataagcataagaaatgcatttcgttcctgactggagcgcttttcacggacttctttttttctcgaaggtccttctgccccacaattccagctgtaattatactctgttccatcgagattcttttctccgtttgcctcgttatgcttcacatcataagacaccaaatcccgcagagtaaatccgttatgcccggtaatcgagtgaaccatggcaactccttttttctgctcgcggaattgataataaaaatcctcaacctgtccttcatcacttttcagaaaacgtcttgccgtcaccaaaaaacggtcattcatctcgcagaacatttcctgaccggcttcatagccacattcatcccagtgataaccaaataatttcaaatgagatagaaccgggtcctgtcgcagccattcaacagacacacactcctgattaaaccgaaaaccatcgatatgaaaacgcagtgcataataccgcatacaagtcagcataaattcaggcgacacatccttaaaataaaaatccatcaccgcgttcatcccctgtgaatgaactgctttaatcagcttctgaaactcctttacctgttcacccttttttgctgcataaccggccttcggagcaaaataaaacgcatcctctgtatagccccagtaattaactttctttaaatccacgccattttcatcatgcatacattcattaaaatcatatgccggcatgagtaacagcgtatttacccctaaatctttcaaataagaaagcttttcctccataccggaaaatgtacccggattttttacatttgacgacttatgtttcgtaaatccacggacgtggcattgatataaaatcatatcacgcgccggaatctttttccaattttctcctgtccagtcaaaatcctgaaaatcaaaacaagctctcacttttccctgacgtctgccaaagtactctcttccggtaatcattctggcataagaatcgcaaaaactttcaccatctgctacaaaaaaataaggcattccctgaagcctgtctgccaaattctccgcttgtaagacaactgtaaaataatcttccatcccgcacattttcgccggatacatcggaaacagtttccgctttccctctgctatgactgccaactgacatttcttcgctttcggccgccagacagaaaccaaaacctcattttcattctgttttctgacaccgcatgaaaactcctgctgcatctcatatggtcttgtctttatcatctcgaataatgtcatgcaatccttcctccataatttctaaaacaattcgtccaattcaagaacttttcttttattataccgaaaaagagtggaagtaacaagaaaaatatgataaaatagaagtcgacacaaataatctacaaacttgggaaaggagattttttatgttattagacagagaatacaaagtaccttccaaaacgaacagcaaaattaatttaaaagtcgttccgggacattttgcaacgacatcttcacacattaatttttatatggatatgaccaccttaaaagttcgccaaaaggaagcttatgaagtagcaagagaaatggcaaaagaataccagtacagcaaaccgattgacaccatcgtatgtatggacggctgtgaaatcatcggtgcctgcttagcagaagaactgaacaaaaacggtattatgtcattaaaccagcatgacagtctgtatgtcattacaccggagtttgacggaaacggacagatgattttccgcgacaacttacagccgatggtaagaggaaagaacatacttcttcttttagcatccgcaacaaccggacgtaccatcgccagaagcctggagtgtattcagtactacggcggtatcattcaaggcatttcagcgattttcagcgcagcaaaagaaatttacggtgaacctgtccactgcatcttctcaacagaggatttgccggactataacacctttacaccaagtgaatgtccacactgcaaaaacaaagaaaaaattgatgcgattgtaaatggattcggatattccgaattgtaaatcgtacataataaaaaacggtaaatcaacggaactgtatggtttcgatgatttaccgtttttttgctatttcaactgtttcaatatttcaagcaaatattcccacgttcgtttcacactttccacatccatactctctttcggcgtgtggatatctttcatatccggtccaaacgagacacagtcaagttccggtatctttccggcaaaaataccacattctacacctgcgtgaagtgcctccacaataggttttctaccatattgctcttcaaatatccggcacatcaaatcacgcagcggcgaattttccagatactcccatgccggataatctccatttgtggtaaccgtgccgcctaatgtctttgtcagacaggccatcttgtcaagcagcgcccgcttttccgattccacactgcttcgcaccgagaatgacagcgaaacatggtctttctccgtcttcataattcctaaatttaacgaagtctgaacaagtcctttcatttgaaaactcatcttctgaattccacccggcagacaaagaagggcggtaatcaccttatccgcggaatccttcgtcattgccaactctttttctacaagtgtagttttctttgcttccaccaaaatcatagggtctgtttccaaaaactcatgttttatttcagaggaaatcacagcaatctttgtattgatttcagactgccgtttttccggacatacaataactgcttctgcctgtctcggaatggcattatctttcaatccaccatttaagaagcacagagaaaatggaatttctttatgcagttcatagagaacccttcccattatctgacaagcattggcgcgccccttatcaatttcaacaccggaatggcctcccattaaaccactgacagaaataacgtatttctccccatcgcctgtctcaaaggaaagtggaagttccacctgcgctgtcacaccgccggcacagctgactaacaaatgcccctcatcttcggaatccaaattcaacatcgtttttgcacgaagaggtgaagtatccaaagctgtggcacctaacattccgatttcttcatctaccgtaagcacaatctccaacggcgggtgtggatattcatccgtctccaataaagcaagagcatacgcaacggcaataccgtcatctcccccaagcgttgttttttctgctgtcacaatgccatcttccacctgcagacaaagtccatccgtctcaaaatcaatgtcacagccctcttctttttcacagaccatatccaaatgcccctgcagcataaccggagccgaattctcatatccttttatgccgtctttccatattatcacattgttatattcatcctgcaaataagtaaggtgatgctcttttgcaaaagaaacacaataatcactgatttttttcgtatttcccgaaccatgcggtatgccacagatttcttcaaaataatgcatcacacgtgccggttctaatgctcccaaaacactcattgtcaattcctccttgctctgtgtaaacttttttcacttctattgtatgaatccacattctctgtgtcaagcaattgtaatttacccaaaaaggtgctaaactatgtttattaactttgcaaagaa

SEQ ID NO: 1151 - DNA, 24841 bp, unidentified
  source 1..24841: mol_type = unassigned DNA
acaatgctgatggagataggcacgccgaggaacagcagcacgccgaacacggcgaacaggataacggtggtcatggtgatactcatttgtctgcaccctccttggattcaactttttcgccggtgacgtcctcatagatgttgatgatctgcgccaggacgatgaacacgccggaaatcggggcgatggagtaaaccaggctgcggggaatacccagcagggccgagaactcgcggctggcagagacagccagcttaaagccgccgatagtgaatacgaagatggccatcagcagaatcagaccatcgatgaccaccagcagggcggtgtgcgccttgccggtaaatttgtcgcggatgagggtcagggacatgtgctcccgggtggagaaggcgtaggccgcgccgatgaagccggtccagatcaggctgtagcggacaagttcctcggtgaaagccacggggctgttgaggatatagcgggagaaaacctgaatcagaaccagcaccgtcataaaggtaagcagtacggcgcaggcaatgctcaaaattttgtccatccagaatttgatggcagcaaaggtgtttttcatagcttactcctcccctcttgcggcgtcgatggtatccagcagcgtcttgacgccgggatactgctccccataggcttcgatcatgggctgggttgcctcgcggaaggcttccttgtcgacgtcatagacgaactcaacgcccatcgtctcctgtgcttccttgacggcctcctccacagcggtgtcccacatgaccttgtgggcatcggtggaatcgtgggcggcctccagaatgatctcctgatcctcggggctgatggtctcccagaccttctcactcatgatgaggacgtcggggatcatggcgtgctggtccaccgagtagaccttgcagacctcgccgtgcttgccggtggtcagggcggtctcgttgttctcggtgccgtcaatgatgccggtctgcagcgaggtgtaaacgtcgccataggacatggcgacgggaatgccgcccagatagctcatcatgtcggtctggctcttcatatcctgcacgcggatcttcaggcccttcaggtcggcgggcgtgcggatggcgcgatccttcgtgtagaaggagcgtgcgccggaggtgtaataggtcagcgtgacaaagccgtcgtcaccggtggagaggaagaagtcctgcatctcctgcgagtccatgacatggtagaagtcatcggtatcgttgaagatatagggcaggccgaaggtgttgaaggcatcgttgtaggtagccagaccgggtgcagaaaccttggtcatggcgataacgccggcctgcagctgctcaaggttctcgttctcgctgccgagctggccgttggggaagatcttgacctggatgcggccatcggtcttttccgcgacctcgtccgcaaactgggtcatggcgatgtggacagtgtgggtctcggacaggccgtgggccagagtcagcaccagcgggttctcggcgctgtagccggtggagtcggcggtggtgccggacgcgccgcagccggtcataacacccagactgagcgcagccgcagcagccaatgctgcgaattttttgaacatggtatttctccttcttgtatgtatgccgtttttcccttggccccctctgagagggggctgcctccgcagcggctgggggagagaaccgtgccattacccgaaatatttcgggctgcggcaaggttcaacctctccgcccctacggggcacctcccctgccaggggaggcaagaagccgggttacatcccgatcaaatcaaactgttcgaacgagacaagtacctcgtgatccttcttggggttggggtacttgatctggacgctcttgaggcgctggctgtagtaccagccgctctcggcctcctcaaacttgcggcggtgcaggaagtgcggcagctctttgccgtccacctgcacatagaacggggacttctcgcggtggatcatatcgaggtacatactctcgacggctgtctcgtagctgccctcattcgtgaaggtcacgacggtcttgacgcctgccttgacggcgatcttcgtcttgagatacgcgcccttgcggtaatcgttcgtgtggccgtcatcctcgtacagcgtgaactcagaatccacatcgggggccatcaggatgtccagcgcggtggtcttttcggtcatcaggttgtgcagcttgttgccgctcatcgggagaatggcaccgctgcgcacaaacagcgggatgctggcaatatcaaccggcacctcaatcgtctggccgggggcgtattcctcgcgggtgtagaagtcgtagaaccgctcgttttcgttctcggtcgcgggcaggtagaccgggcggacggtctggcccttttcaacgacgttcgcaaccagcagagaatcaccgaacatgaagtccacgccctcatcgtaggtggccgggtcgttctggaaaacgctgaacgtcggctgccagatgggcaggccgttctcatgcgcgcgctccatcagggaatacagcgtcgggctgagcttatagcggaagtcaatagcgtccttgatgtactgctttttgtcgctgtacatccacggctcggtgacggtgttgtcggtgttcgtggagtggatggagaagcgcggctggaagatgccgttctgcacccagcgcacgaacagctcgccctccggcgcggggccgaagaagccgccgatgtcgcagccgtggttggacacgccgcagagcgccatgcccagaatcgtggcgatgttgtatttcagggtatcccagtgggtcaggttgtcaccggcccagacctgcgcatagcgctggatgcccgcatggccggaacggcagaccgagaacgggcggcagtcggggtcatactcctcgatggcctcgttggacagctggcacatcaggttgctcatgaccggcttcatcgtgccaatcgtgcttcccttgccctcaaagtaaacctttgcatccttgtcaacgagggagtcatactcgcagttgtcgttccagatggaacggcagccgtatttcagcagcgcatccttaatgtactgcttccagtgctgccgggtggattccttcgtgtagtccacaaacaggccggggccgccccaccaggtaccgacagccagaccgtcaagacctgcattgtcgtcggaggcgggcaggaacatgcccttctccttcatctcgttcagcagcggatggacgagcagcataccgggcttgatgttgggcgagacgacgatgccgcgcttttccatctgggcgaaccagtctgccgggtccttgaagcgcttgtggttccatgtgaaggtgcagcgcttgatgccctcggcggtctcaacggcgcagtagccgctggacagctggaagccgtcggcagggatgccttcctcgcgggtcgtgtcgatgaagtccagcacggcatcgtcgctgttctcgggcagctcggggtagtacatcgagctgccaaggtagcccagcgcggccttcggcagcatgacgctcttgccggtcaggtcggtatagcgctcgatgatctcgcggatggacgggcctgcgatcaaaaacaggtcaatgtcgcccgcgtcggtgcggtaggacgagtagcggtgccagtagttgcgcttctcgcggcccatgttgaaatcgcactcggcggtattgtggtagaagtagccgacagcctgcttcgtgccgcggttcaggcggatatagaacggaatgtgcttgtagagggaatccgtctccttggcgttgtagcccatggcgtcgccgggagccatattcatgtatttctcggccttgttgatctcgccggatttctcgccgaagccgtagaagcagtcgtcggcctcgatctggctggcgtggatgcggcggtggttgctgtcctcgcggtaggccaggtcgggaatgtcggcgtgcagcaggctgccgtccttatcatagaccatgatgcggaacggtgccttctcgatgacgaccttgagacgcgcaccctggataacggcctgcctgtcgccgtcggtcagggctgcggcggcggactggacgcgcttgcggcagtccttcatcagctcgtcggtgcgggactcccatgcggtcatggtcaggctgtaggaggcttcatcccagtcgccgtcaaagcccgcgcggatgcgcagtatatcgtcggtcaggaaccagatgcgcagctctacagcgttggtggctacggaataatagcttccgcagtccttgacagcgccgccggtgtagcacactttcataggttttctccttccttttttgcgtataattgaatggtggaacttgttatttggcagacaatgtgcatattgtacaaaattacataatatattttgttcaatctgcgcattgtgcccttcttcgcctttataataacaaatccttcacaaaatttcttccgtatttgtaatgcaaatgtcgcaaaatgtgatataatcgtggcaaagacaaaatttaaggcaataccgcataattctaagcgccgatacggcgagcgaggcacggcagatgctaagccaaaagcgcagataatactttgtgtattatcgagcattttggcaacgcagatgccgtgccgcacaccgagccgcagcgaggcgcttcggagcgcaaccgccgcttgcggcggctcttggcgcggagatccgccggagcggtgcttaagccattaggcgggaattgtgcggtgttgccttgacaggaggagtcgctcatgatcctgcaaaaaatgccgcattacgtggattccattctgacgcaggaggatgccagtgccgccctgcaggacggtcaggttgtcgtgggcctgtatacaaaccgggagaatgtccagtcggtggtccactcccacccgtattatgagatgatactgccggtggcgggcagcagcgtgcgctactccgtcgacggcagtgtctacgatttgcacctgggggagctgatactgttcccgggcgagatgtaccactccggcaagttcaacatcacggacacgacctcggagcggctcgtcgtgcagatagctcccggcatctgggagcgtgcctgggcgcaaagcggcctgccgcggcatgtctggtcgggggatcctgtcattctggacactgacgccgtcacgcagtgggacttccgcggtctgctggagcggatggcccagaccgtgtatctcgatgaaaaaatacgcgataccgtacaatgctgcgaggtcacggagctgattttgcttatcagccaagttgtgacccggcggcacaatgccccgccgccctcggccaccagtctgctcgtcgccaaggcggttgcttaccttcaggccaactacaccgacccgcatctgaccgtggcccagctggcaaagtacacctacaccagccgggagcacctgtcccgcgtgttcaaagagtacacgctggaaagtatacacgggtatctgaccaacctgcgtatgcagcactgccgcaacgagctcgccgacggcaccggcgtactggacgcctgcaccgccagcggttttgcaaattacagcagctttttaaagagtttccgcgcactgtacggcatcacccccgccgagtaccgcgcccagctaaggcagagccgcagaacgccataaagaaaaccgcacattgcggtgtgccgttcctcgtgccgttcggtatcggctgcggtgtctgttgccttgtaaaccaaaatcaccgcgatataaacaaaaatccgccggggagccttcccaaaaacaggaaggctccccggcggtatttatttatgggcattcttatatgcgatgactttctgtccgcatcaaagatatttccgcagggtcggcacaagaacgctcatattgatcggctttgcgatatggtcgttcatcccggcgtccagcgccacctgtttatcttcggaaaacgcatttgccgtcatggcgacaatggggatatttgctttttgaggatcgtccattctccgaatcttttttgtcgcatcgtagccgttcatcacgggcatctggacgtccataaggatcagctgatacgttccgtccgcagctttttccagcatgtccacgcattccacaccatcttttgcgcggtctaccgtacagccttcttcctgcagcagctcggtggcgatctccgcattgaggtcgttgtcctcggtcagcaggatccttgtaccgcacaggcacttttgatccgaagggttgatctctcgtttcgcctgtatttcatcctcggacgcaatgcggcagggaatggtcacggtaaacgtggagccaacaccgattttgctctccacctccacggtaccgcccatcagctcgaccagctttttcacgatgcccatccagatgccgctgccttccaccttgctgacggtggatgtgcgttcccgttcaaacggttcaaagatatgcttctggaactcctgcgacataccgatgccgttgtcggcaaccgtgaccaccgtatcgcaccagccctctttttcgccgggcttctgcgtaacatcgcagcggatcgtgccgccggctcccgtgtatttgacagcgttgctgacgaggtttgtacagacctccgtcaggtgcggaatatccgcatagatatacggatacggcagctgtgttgtcaccgtaagcgtctggcccttgctgtctgcctgattctggaacattgcaatgcaattacggaaatccttatcgacatccgaaacagaatactccatttccgtcttatcgttctcaatgcgggcaagatccagaacattgttcagcagcatcagcaggttctgtccgcacacctggatgttctccatgtatttttccagctttgcagggtcgtccagatgccgggaggcaaggtctgcatagccgataatggcgttcatgggggtacggatgtcatgcgacatattgaacaggaaggtggatttggcccggttcgcgctctcggcgttttccgcagcgatctgcaattttgcattcagctcctgcgtatcgttcgcggcttttcttgcggcagcttcggctttgcgtgccttgtggagcagcttcaggatcgtgagcagaatgactgcaacaaaaatgctgctgaccagcaggaccatgaagaagttatcccttataaactcactcagggtaaccttccgcgcggagctcttatgcatcgccagagagctggtaagcatattggctggcattgccttgatcgttttgttcaggatggacagcaggctgcggtttccgctcttgaccgcaaagcaggaattggcagggttgggcagcggaacgctgtaaaaaccataatttttgctgtatttcgcctcactgctgacccctgtgataaaacagtctgcctgtccgtccttgaccagctttatcgcatcctcctgtgtatcgcagtccacgatttcccactgcggataataaaacgcaatgtaccttgttagggaaatcttgttttggggaacggcaacgcggttcacttggttttcgataaagagctgtttgttcgtgaccaccatcatattggcggtccaagttgtgttggttctggcaaggcgatattcttcagccagattaggactctggtcgaaatggaagaccatgtcgatctcgcctgatttcagcgcattgagttccgcctctttgtcgtcataaccgaccaactggaattccagctcctgatttcccagacaatctctggcaaactgaatatagtccgtgattgttccggtaatctccccggtggcagggtcataggtgctgacgccgctgtcactcgtcagaaagcccatccggatcgcaccgtgctctttgagccacgccttttcctcacccgtaaggatgggcttataatccagcgagaaatactttttacacaggtccgccgtataaaaaggagcctcttcgtccaacgcgcgcatcgcattgtccagttcttccttgagatcagaactgtctttgttgagcacatagtagatgctggattttcccacgcgggttatggtcgagatgccaagctctgcccagcaggattcttccagtgaaacaaagcagtcgatctcgtggtttgccagcttttgcttcacatcctcgttgttggagatgttgacgtgctgcgttttcaggccgtatttttcttcccattcggtcagcatcacctccgactcagctcccatcagaacaccgatctttttgccgttcagcgttttgtaatcggaagtggagaggtctgtgcgcgagagatcggcatagaggtaatatttttcctcccccatcggttcgtccgaaaacagcatctcctcagcgcgatcctccgtataagaaataccacccatgatgtcgatctcgccgttttcaagtttttcaaagcagtctgaccagtcgcaggtcacatactcgaactgccagcctgtatagccggatagtgtttccagcaactcgtagccgtagccctttcttgcgcccttctcgttgcaatagttgaaggtgtcctcaaacgaaccaacgcggacgacctttgcaggggcggtttctgcggcagccttcacagggagcgcgactgacagcaacagcagcaggcacagcaccgcacagacgcttttccgcatcagcgtctgcacggtttcgcttattccagagtttttcatgattccacaatctttctccgccccaggcggctgcattttgattccatttccgtaccgccgatttcaggaaggtcatggcggtctccgtcgcatcgggttgtcagcagccttcttgaacagtatataccaacgtatacagtatgtattatagcattgtcgcgaaatcgtttcaagattttttcgctgggcagcgtaagtaaatataaggcaataccgcataattcgcgggaattatgcggtattgccttaggtcgtcatcgcagacgattttagaatcggtataattattcaggcagttgaatctccggcatcagctcatcggagacgacttgcagcatttcctccaatttagccaggtcatcgggaccgaagcgctgtttagcgcgctccatgacaaggtgcaagtaggaataactgatgttatagtaatcaatgtacttttgggtcgggcgcaggcggtattcccgcttgtcgatggtggatcggatgcgctctacatagccttttttgaccagtgagttgatcttatacgcggcgttgggggtagaaagattcatcatgtggctgaactgcgcaatcgtaggttcgcccaatgccatgatgacttccatgcagaaagattctaccgtcgtcagcgtggcttcgcgatcctcgaatcgactgaagatctgcttatagaagtgcagtttgaatttggtatatacccgtccgaatgtctggtccagcatagcgagaatccccctgtaggttagtggatttattatagcacattccgccatgtaaaaccagccctcaggcatccgtgagaacaaacgtcagctcggcgttggccgcgcgcacgccgtccacccatgcggtggccttgccgatgcctaccgggccatgctgttctatcagctcacattccaatatcagtacatcgccgggtatgacctgccggcggaaacgggcgttttttacaccgccgaacagggcgagctttccacggttttccggcaggcttaacgcggctaccgccccggtctgggccagcgcttccagaatcagcacaccgggcataacggggtgtcccggaaagtgcccctcaaaaaaaggttccgtgcgggtcacgcatttgacgccccgcgcccattggccgggggtgtagtccaggatcttatccaccaaagcaaacgggtaacggtgcggcaggatcttttcgatctctgccgcgctcatggctcggggcggctcatttggcgtatagttcatcctcatccctcccagcgtttgaataccacgcaggcgttatggccgccaaagcccagactatcgctcatggcatactccacctgcgccgcgcgcccatggttggggatatagtccagatccagctccgggtccggctcctgcaaattgacggtggcgggcaaaaaggcatcgtgcagagccagcgcggtaaatacgccctctaccccgcctgcaccgcccagcagatggccggtcatcgacttggtagaagacacggccagcttgtacgcatggccgccgaacaccgttttgatggcagttgtctcgcagctgtcattcaggtgggtggacgtcccgtgggcgttgatgtagccgacctgttcaggcactaccccgccgtcggccagcgccagccgcatacaggccgcaccgcctgcaccgcccggtgccggggcggtaaagtggtaggcgtcgcagttagcgccatagcccacgacctcggcataaattttggcaccgcgcgctttggcggcctcgagttcttccagtagcagtacgccgctgccctcgcccatcacaaagccgctgcggcgggcgtcaaaagggatcgaggcccgggccgggtcgtccgccgtgcaaagggctttcatgctggcaaagccgcccacgcccagcgggctgatgcagctttcgctgccgccgcagagcatgcggtcctcgtatccatcgcggatacggtggaacgcatcgccgattgcattggtgccgcctgcacaggcggtggtggggcagctgcacatgccctgcaagccaaaacggatggcgatctgccccgccgccatattgccaatggacatggggacaaaataggggctgaccttttcaaagccgcgctgctgaccgcgggtgtgttcttcctcgatggtgggcaggccgccgatgccgctggaaaggatcacgccaaaccgcgtatggtcgatttcttccagcgcaaggccgctgtcgcggatggcttcgtcggcggcggccacggcaaactgggtaaagcgtgccattttgcgggcttcgcgcttgtcgatgcgcgcggcggggtcaaagtccttgacctctgcggccagctttactttaaaatcagccgtatcaaaagccgtgatcggtcctactgcgcagcggccagccttaatgttcgcccagctttctgccaccgtattaccggtaggatttaccgtgccaaggccggtaataacgacccggcgtttcttttttgtgtccattgcacacctcacattcccattccgccgtcaacgcaaaggacctgcccggtaatatacccggcctgctcccctgccagaaaagccaccgctgccgcaacatcctcagcatggccgattttgcctgccgggatggccgcttccgctgcggcacgggccggttctgacagcacggcggtcatatctgttgcaataaaaccgggagccacaacgttggcggtgatattgcgggcagcatactctttggcagcgcttttcgtcaggccgatcaaccccgccttgctggctgcgtagttggcctgacccgcgttgccgtgcagaccgacaacactgctgacgctgatgatgcgcccataccgctggtgcatcataaaacggcaggccgctttggtgcagaaaaatgcccccttcaggttggtggcaagcacattgtcaaaatcagcttcggtcatccgcagaagcaatttgtcggcggtaatgcccgcgttgttgaccagcacatcgatccgcccaaaagcggcaacggtatcttctaccagtttctgacatgcttcggggctgcgcacgtccgcctgcagcgtgacagcctgcacgccaaggacgcggcaggctgcggctgtttcctcggcagcggcagcgctgccggcatagttgacggcaatgttcatgccgttttcggccaaagcccggcaaatggcacggccaatgcctttggccccacccgtaaccagagcggcacggcgcaagttttcggtttgcggcatggtcaggctcctttcatggtgcgcagcagctgttgcagctgcgcggcagtttccaccggatagcacgagatagcgcttcccacagtctttttgacaaacccggtcaacgccctgccggggccgatctcaatggcggcgtccacgcccaattctgccagacggcggacggtcacctcccaacgcacgccggactgcacctgtttttccagcagcgcggcaatggtgtcggtttcctccatctcgtgtcccaggcagttgaacagcacagggaactgcatcggcgcaaagcggacagccttacatttttcccgcagtgcatcccctgccgggtgcatcaatgaggtatggaacgggccgctgacattcagcggcaggcagcgccgtgacccggcagcaagcgccaactcggcagctttatcgacagcggccttgtcaccgccaatgaccagctggccggggcagttgtagttgcagatctgcacaacaccttcgtcggcggctgcattgcagcatgcctgcaagggggcttcgtccagccccaaaacggctgtcatcccgcaggtgcgccccgccgcagccgcagccattgccttaccgcggaaagcggttaaagcgactgcggtctgcacatcgaacacccccgcacaggccagggcggaatactcccccagcgacagccctgccgcataatccggtgtgacgcctgcctcccgcagcacggcagtaaggccagcggcaaacgccgtcatacagggctgggtgtattgggtctcgctcaatacaccggctgcgtcggtaaagcagacttctttcaaatcaaaatccaccgccgcgtcggcttcgtcaaaagcagcgcggaaagccgggaaagtctcataaagatcccggcccataccggcgtgctggctgccctgcccggcgtataaaaatgctagtttcataaggtgatctccttgtacaccccggcgatgcagtctttggcttcgcttaccatcgcggcaaaaatttcttccaccgggcggacttcgtgcagcagccctgcggcctgtccggccatcaggctgccattctcggtgtcaccgtcaaacacagccttgcgcaggcttcctaaagtaaagcgttccagcgccattttatcagccccggccttttcctggcggacatactcgcggctcatgcggtttttcagtacacgcacaggggtgccgccgatgcgcccggtcacgatggtatcactgtcgcgggcttttaacagggcggctttatagttttcatggatggggcactcggtgctcgccagcagacaggtaccgacctgcacaccgcacgcccccaatgccagcgcagcagccagccctcgcccatcggcaataccgcccgcagcaatgacaggcacatggacggcatcgacgacctgcgggacaagtgccatcgtggtcatctcgcccacatggccgccgctctcggtgccttcggcaataacggcgtcaatgccgagcggttccagatgtttggccaaaatggctgccgccaccacggggatgaccgtgataccggctgctttccacgcggccatgtactttcccggatttcccgccccggtggtgacgagctttacgccctcctccaccacgattttggcaaattcatccgcctgcgggtgcatcagcatgatgttcacgccaaagggcttgtcggtcagtgcgcggcagcggcggatgttttcccgcagggagtccacgtccatgccgccggaaccgatcagccccagcgccccggcgttggaacaggcagcggcaaactcgcccgtggcgatattggccatgccgccctgtataatgggatattttgtacctaaaatttcattgagcagcttcattttccaccctcatacgtcagcagcatcccgccccatgtcagcccgccgccaaagccgatgcaggccagcgtctggccgggtcgcagcagatcactttcggccatttcgtgcagggcaatcgggatgctggcagcactggtgttgccgtgacggcttatgtttttgtaaaactttgacggttctgcgtgtaaacttttgacacaatggtcaattatgcggctgttggcctggtggcagactacccagtccagatcagacaatgtcttttggctgcggtccagcacggcttgcagacagcgcggcatagcctccacggcaaagcggaaaaccgccttgccatccatcgtgatcggcgcggtatcgcaggccgcagggccgcccgcgcggatcgcttcactgccccgtgcgcctaacgttacggcgaacggtacattttcggccagctcaaaaacagccgcacccgcgccgtcgccaaacaatacacaggtcgtgcggtcagtcgggtccaccatgcgggagagtgcctcgcagccaatgaccagcgcataccgcccgcccagcgtgctcaggagcccgtgggccgcggcggcggcataaataaagccggaacaggccgcattcacatcaaaggcaggccggttttccggcagacccaaggcagcctgtacgcggcaggcaatgcttggggtagccgtcggggccgagagcgttgccacaacacagcaggcaatgtcgtttgccgccagaccgctgcgggtcagggcctgacgggcggcggtgatagccagcgtggcggcatcctcgttttcggtgcagtaatagcgctggcagatgccggtgcgggtcgtgatccattcgtcgctggtgtccacctgtcggcgcaagtcctcgttcgtcactacacggctgggcaatgccccgccggtagccagcagctgtaaacctttcatgcgcccctcatttctccgatgcggcggtattttttgtagcgctgttctgccaacgctttgccgctcatcttgcataaagcggcaaggtgcaccgcaatggcggtgtccaaccggctgaaaagcagctgccgtccacgctgtgcgccgcccagcggttcggggatgatctcttccacaatgccatctgcgtacaggtcctgtgccgtcagcttcatcatggtgcaggcctcgccgctgcgggaagcatctttccacaaaatactggcaaacccctcggggctgagcactgagtacacggcattttccagcatcagaatgtggttggcaacgcccagccccagcgcgccgccgctggacccctcgcctgtgacaatggccaacaccgggacggtcaggccgctcatctccatcaggttgcgggcaatggcttccccttggccgcgttcttccgcatccttgccggggtaagcaccgggagtgtcaataaaagtgatgatgggacggtgaaatttttccgcctgtttcatcacgcgcagggccttgcggtagccctccggtcccggcatgccaaagttgcagcgcaggttttcttccagcgtagtccctttgcggtgccccaaaacggtaacgggcatcccgtggaaccgtgcgatcccgcataaaatggccgcatcctctttgcattgtcggtcaccgcactgctcaaaaaagtcggtaaacaagttgtcgatcatttcggttatatgcgggcggtcagggcggcgggccagaaaaacacggtcctccggcgtcagcgaggtgcagcgctgtaaaagcgtgttttcctctgcggaaagctcagccagttcagccgcatgggtggtcgtgctcgccatttcggcgtcatcggcacggctgcacagcgcgtcgatctgcgcgtccagcggttccaactgctgcaaaacttctttgatcatctgcgcttcctcccctgcgtgtggagctgcaagatccgcgttaagacctctttcaactcggtgcgcggcacgacctgatccacaaaaccgtgttccagctggaactcgctgcgctgaaacccgccgggcagtttttcaccgatggtctgttcaatgacgcgcggcccggcaaagccgatgagtgcccccggttcggcgagcgtaatatcacccagactggcaaagctggccgtgactccgcctgtggtggggtgggtcagcacgctgatgtacaacccgccgctgcggttgaaccgttccagcgcggcgctggttttggccatctgcatcaggctgaaaatgccctcctgcatccgtgcgccgccactggcagaaaaaataatgagcggcaggtgcttgtcggcagcgtactcaatcgcacgtgtgattttttcaccaacagcggtgctcatgctgcccataaaaaaacggctgtccagcacagcgaccaccgcctgcacgccgccgatcctgccgattgctgtaacggcggcttctttcaggccggtcttgaccgaagcagcggccagcttttcctgataatcgggaaaatgcagcacatcgttgggcgcaatgtccgggttcagttctttaaaagttccgtggtccagaaccgtgctgagccgataataggcgccgattgccaaatgcaccccgcagttggggcagacatactggctcttgacccaaacctgtcgcgtggcacggcggccgcattttttgcactcgacaaattgcggcggcacccagttgggcgcagccgtgccggcatcgcggcgggctttcatctgaaagctgcgctcctgcgggctggtcgggaacagcttttcaatggcactcatcctgcaataccctttaggctgcccgcgcagccagatagttgaagatgtcgcccacggttttgagcgtccccaggtcctcgtcggcaatcgtaacgccgaacttgtcctcaaacgccatgttcagctctaccgcatccaggctgtccgcctgcaggtcgtcggtcaggctggcatccattgtgaccttatcagcatcgcagttcagggtgtcaacaaatacttcttttacttcttcaaagctcatattacgtacctcacataatttaactaaataaattgacgtaattgtcaatgaggtcattataccacgtttgttttgaatgtcaatattattaggtaaaattatttatctaattgaatcgccgtttttctcatcgtccggtattataaaaagggaagcacacaaattatcccccctgcaggggcagccctttctgactgcgatttgaccgctgctgcatatcttccctgtgaaatatccaatcgcctttaaatggttttatttactttctcttttactctcccagattattttctattctgcaacatatttcgctctaatgtgctatactaataatatccaataaggatggaggaacttctatgaaacgcagcagcatccgactccaatacaatgcccccgtcacactgacctttttctttttgtccctcgcctctctggtattgggctacttaacaagcaactggacaacctcgcacctgtttagtgtgtatcgctcgtcgatgaccgatccgctgttctatgtccggttgttcggtcatgtccttggccacggcgattggaatcactttataaacaatatgctcctcttccttgttgtcgctccacctttggaagaacgatacggaagccgaacacttctaagcggtatccttatgaccgcgctggtatccggcatattgcagtgtgtgctgttccccacttctgcattgcttggtgcatccggtatcgtattcatgctcatcatgctctccagtttggccggcagtaagaatggaggtatccctatcaccttcatcttagttggcgtgctgtacttaagccagcagatttacagtatcctctttatacaagataatgtagctaactttatgcacattgtcggtggtatttgcggtacagcttttggttttgccgtccggaagagataacgaatgattggaaagagaatcttatttatgatgagtaagcacatttttcagaaagaacccgtcctgagcattgccacttgtttggcgatcatttccgctttctttgtccccccggacgcagaatacctcggatatatcgatttccgtactcttgcaatcctgttttcgctaatgacagttatggccggactgagagggcagggcgtatttgatagactcggccatgccctcctatctcatacccgcaccactttgcagctaacagttgttctcgctggcctatgcttcttcagcagtatgctgataacaaacgatgtatcgctgctaacattcgtgccatttacgtttgtcgttctgaatcgtttgaacgcatctgttcgcagcaaactgctcctccctatcgtctgtatgcagacgatagctgccaaccttggcagtatgcttacaccactgggcaatccccaaaacctgtatttgtatggcaagagcgggatggatatgagttcttttgttctgttgatgcttccctattccatcatatcattagtgcttattgctatatgggcagtatggctatgccgtgaaggttccgacattgttgtaactcattctgcggtaaactcagaaccagacaagaaactcattgcgttgtacggtattctgtttatcgcctgtttattggttgtattgcgtgttctcccatacggtgttgcattcgccgctatcttggtgtgcaccttctttgctgaccgccccactcttggccgcgtagactattctctgattcttacctttgtagcattgttcattttcatcgggaacttaggtcggattgaagcgttctctggatggttgcagaatattctggccggccatgaggttttcgtatccgttctggcctctcaagtgaccagtaatgtgcctgctgccatcctgctttctggatttaccgataatttccgtgcgctgattattggcacaaaccttggtggccttggcacattaattgcatccatggcaagcctgatttcttatcgacagattgcaaatgaagtacctgctgaaaaagggcactattttgcgatgtttactatttccaatgtagtgtttctggccattctgatgggcgcttgggccctgacctgatatttccgtaattctattgctatttaacgtctttaaacgaaaatccacattcgtaaatggtcgcgcaggcaagtaaaagcgagcgcattgtgaaaaattacgtcagcaattacagaaagctcaaacaccatcttcacgcagaaggctgaaagctatagggaaacaaaaaagcggaggaggcaaaacgcctcctccgcgccaaaattttcggttgtagggaaacaccgggggtagaaagtgtatcactgccatccccttgccgcagggtcgagcatttcggcggcggaatacaccagcgcgttgcagatggcggcagccacgttgctgccgcccttgcggcccatggcagcgatggcgggcacgccgtactgcgtgcaaaccgcaaacagccgctccttgctttccaccacgttcacaaagccgacgggcacggcgatgaccagcgcggggcgcagaccgctttcgatctcgtccgcaatcgtcagcagcgccgtgggggcgttgccaacagccagcaccgcgccggggtactcccgcgcggccctgtgcatggcggcggcggcccgggtcgagcccgccgccttcgcagcagcggcgacagcagggtctgccataaagcagagtgcctgcccacccaatttggccagaccgggctttgtgatgcccgccagcgccatgttggtgtcggtgatgaccactgccccggcacgcatggccgcgacgcccgccgccgccgcgccggatgtgaagcgcaggttctcggcgtagtcaaaatccgctgtcgtgtgaataacgcgcttgaccacggcggcgttttcgggcggaaccgcaagcccgcgcgcggccagctccgccgtgataatgcccatgctcgtgcgctcaatatcggcgggcagatgatgctgcggtgtcattttttccctcctctgggattgtgcagacccatggccgcgtagacggcatccatgtccagcgcactgcgcacgccgtcggccagcaggtccagctgctgtgtgcggtagtcggccatcgcaagcggcacggcggtctccggcgcgattcccttgcggcggcagaggtacgcggccagctgctccgtcaattcgccgctgtcaaacaggccgtgcaggtaggtgccgaacacggcgttttgcacgcagccctccggtgtgccgtcggcatagcggcagaacggtgcgccgttcaccgcggtgcggcccgtgtgaatttcatatccgatcagcgcagccccggcaaagggcgcggcagccgtcgccgtgacctgtgcgcggcgcttttcggcggtaaagaccgtccgcgtcggcagcaggcccagcccgcgcagcgtctgcggatggccgctctcggtgccctgactgtcgtcaagcgtctcgcccagcagctgatagccgccgcagacacccagcaccggcgtgccgcctgctgccagcttgagcacagcggcctccagcccggactggcgcagccacaacaggtcgttcactgtgtttttggtgccgggcagaatgaccaggtccggcgcgcccagctcccgcacggactgcacgtaccgcacacccaaaagcgggtgctgttccagcggcataaaatcggtaaaattggaaatatgcggcaatctcaagacagctgcgtccagcggcttgaccgcgcttttgttttgcagccgcggcgcaagcgagtcctcgtcctcgatgtccacccgcaggtacggcacgacgcccaacaccggcagctgtgttttttcctccagcattgccagcccggggcgcaaaatttctacgtcgccgcggaatttattgatgataagcccgcatatacgcgcgcgctcgtccggctccagcagcgccaccgtgccgtacagctgcgcaaagacgccgccgcggtcaatgtcgcccgccagcagaaccggcgcgtccacgagctttgccagccccatgttgacaatgtcgtctgccttcagattgatctcggccggactgcccgcaccctcgatgacgatgatgtcaaattcatcggcaaggctgtcgtaggcacgcagaatatcgggaatcagcgactttttgcggcggaagtattcctttgcgggcatatcgccgcggacctcgccgttcacgatgacctggctgcccacatcgctgctcggcttgagcaggatcgggttcatccgcacatcgggctcgacgcccgcggcctgcgcctgcacgacctgtgcgcggcccatttcgaggccgtcccgggtcacaaagctgttcagcgccatgttctgacttttgaacggcgcggttttgtagccgtcctgcgcaaaaatgcggcagagcgccgcgcacagcaggcttttgcccgcgccgctcatcgtgccctgcaccatgatgcaccctgcccggctcatgccagcacctcccgcataattttcaacagctgttcgttttctttttgggtgcgcacagcggtgcggtaccacgtctcgtccagccccgggtagttgccgcagccgcgcaccaccgcaccgtgacggcgcagctttgccccaaagtctgccggtgcgcggaacagcaggtagttggcctgtccgtccacgacccgcagccccagtgcccgcagtcccgcggccagccttgggcgctggtcggcaatgagtgtgcgcacgctgtcggcataggcggtctcctccagtgcggccagccctgcggcctgtgcaagaccggacacggcccacggctgacccgccgcgcgcattttgtccagcagcgccgcgtcactgcacagcgcatagcccagccgcaccccggccatggcgtagagcttggtgaatgcctttaagattataaggttcggtgcatcgcgcaaaactgtcttagctgtcagggcatcccgtgcggcgaggaagtcgaggaagcactcatccacgaccagcaccgcgccacagtcggcacagcggcgcagcagcttttgcaccataacgagcggcgtgacctgcccggtggggttgttgggctggcagaggaacactgcatcggtgctgtcgtcgatggcgtctgcaaagccgtccgtcacggcaaagtcgttttcctcccgcaaaagaaaccgctgtacgtcacaatccaccgtttccagcgcagcggcgtactcggcaaaggtcggcgcgggcagcaatgcgcgccgcgggcgcagggccagtgccaggcggtagatcaggtccgccgcaccgttgccgcacaaaatttgcgcagtatccacaccctctgccgctgccagcttagtgcgcagtgcccggcagagcgggtccgggtagcgatccgccatgggcagtgccgctgtgatggccgccgccacgcccgcgggcagccccagcgggctgacgttggccgaaaaatccaacgcgtcccggccaaactcggcccgatagcccgcccagtcgccgccgtgtaccagttccattccgcattccctcacaagacaagcatcagccgcacggccagccccaacacaagggccagcaggctctcggcgtacatcatgcggttggcacgcaggatgtcccgcggctcgatctcccgcagcgggtcgccaattgtcggcttatcgtaatattcgccaaagtaataggccgggcccgccagctgcacgcccagtgccccggcgcaggcgctctcggtctgggcgctgttggggctggcgtggcggcggcggtcccgccgccagatgcgccacgccccgcgggcgctgttgcccgtcagcgccgccgcagccacccagagcagcgcggccaggcggctgggcagccagttggcggcatcgtccaatttggcggcacagcgcccgaaataaagatatttttcgtttttgtagccgagcatgctgtccatcgtgttgatggccttgtaggtcagcgccagcggtgccccgccaaggagcatatacaaaagcggcgcaatgacgccgtcgctggcgttctcggccacggtctccacggcggctctggtcacgcccgcggcggtcaggttttgcgtgtcacggcccacgatgcgggccacagccctgcgggccgcgggcaggtcaccctttgccagttccttgtacacattgcggctctcctgtgcaagacccttggcagccagcgcctggccgcaccagagcatttgcagcgccagccccagcgccggatggagccttgccgcggcccagcaggcaagcccggtaacggccagcgtgcccagcggcagcaccgcggccaccgcggccccgccggccagctcgccccgcggcgttttgggcagtgcggtgcgcaggtgcttttccagcgccgagatgcaccggcccatgagcaccaccggatgcggcagccacgccgggtcgccaaacagagcgtccagcaaaaagccgcccagcaccgcccaaaagatcagcatgtgctctccttcgtgtactgcacggtcttgaccaaacgcagctcatgccgcgacgcccagtcgcgggcgtccagtacatagccgcccgcgttggggccgcaccaccggtaataactgcggcgcggcacgccgtagcgctccaatgcggccatctgggtgccgccgtgggccaggatcaccagcatttcctcgccgtcggccagcgccttgtccaccagcgccgcaaacgtgcggcatacgcggtcactgaaatcatccttgcgctcaccgtcggggcagctgctctcgcagttggcggcgacccacgcctgatagtcggggtcgtgctccatctcaatataattgcggccttcaaagctgccgaagcacatctccttcagcccgtccacgggcacgagctccgcgtccgggaacagcacctccgccgtctgccttgtacgctgcagcgtggaaatatagacaaccttcgggtcaatatcagcccggcgcagctgggccagcccctcgggcgagagcgggatgtcccgctgaccctgatagcgcttctgggcgttgtactcggtcaggccgtggcgcagtaaataaatcagcatttcggaagttctcctttcaaaatcgtcggcagaccgcaaaacatctgcacaacgcagtccgcccgcgcggccagcagacaggccagacggcccgccgcctcccgcgcggcacgcgcggcggggtcaatcggcacaacgccgccgccgacctccgccgcggtcacaacatcataatctgccagctcgtcggccagccggttcaaatcggcggcggcgtcggccaaatcctgcacgtcgtacacctgccgcccgccgagcttttgcgcaaaggtgcgcttgccgctgcagagcggccctgtcacaaacaccatttacagcacccccagccattggcaggcggccagcgccgccagcatccagatctcgcatttttgcaggaaccacccggccagatcaccggtcacaccgccaaactgtttttttgaaacaacatagtaccgcgcaaaaacacagcctgcggccagcaccagcgcccagccgcccagtgcagtcagccccacggccagcatggcgcagagcgcggccagcacctgccgcacgcggacgcggtccgccgccgtggcaaaggtgtgggcaaggccggtgtttttcgccagcgggaacgccgccacggccagcccggacagcgcccgctcccccaccagcgccagcgtccagagcacaccgacccgcggggtgaacgccacacagccgcacagcgcaaaatacgccgcaaagtagctgcacagccgaatgaccgcgaacgcgccgcagtgggggtcctttaaaatttccagcttcttcgcggtatcgccgtagcttgaaagcgcgtcgcaggtgtc

SEQ ID NO: 1152 - DNA, 7767 bp, unidentified
  source 1..7767: mol_type = unassigned DNA
tcagccatgatatgcctccttcatcttttctataaatttatcttcgccaactctctcgattgtgaatcggaaacgttcgcttggatttgcgttatcatcaaaaaactgaattgctgcgtctgttacacggaacaaatcttcctcagattcaatgaccggcaaaatttcctcacctttgtgaatccggttaccaaacagtccgccaaatgatacaagataaccgctttttgcatcccatgcatccgtcgggcaggccttcacgcagcgtccacagtaattacatttactctcatccactttaattttattatcctcaagagtaatcgcaccggtgcggcatgccttaacacagacaccacaggaaatacaggcatcttctttccactgcacctttgttgcacctttgataccaacatcattttcctctgcctttaagcaattgttctgacagccggtcacaccaaatttaaacttatgtggaagttctctggcgaaatatctctcatccagtttttttgcaatatcatatgtgtcaatgttgccgcttggacaaatctgatttccctgacaggaagtaatcgtacgcacacgtggtccgcacacacccggcttacagccaccttttgccaaatcttcttttacggcatcaatatcatctaatttgataaatggaatttccacgctctgacgggaggtcaagtgaacatgtccatctccatatttgtctgctacttccgcaattgtcttcaaattctctgcggttaagtttcctcctacgactgccaatcgaagagaaaaacaatttttttgtttctggcgcataaatccgccctttttcagtgtactgtagtctactgccattttcttatcctcctgctctttctacttgagtgcgtgcttaaaatcttcgattaaatcttccacatcttcaattccaacactaatgcgaatcaaatcatcaaaaacgcccgcttcttctttttctttttgtgtactgtgtgcattcagcgtcgattccggatgaatgattaaagtttttgtatcgccaatattcgacacaattttcggtattgtcaatgtgttaatcaaatcaaacgcacgctctttggagccaactcgaattgtaagaattgctccatatccattttgcagaactttctctgcctgtgcatgccataaactgtcactaagtcccggataatttactgttacatccggatacgtgtttaaaaattcagccagtcttttcgcattatcgcaggcccgctccatacgcagacccagagtttccatacctaagagattataaaacgctgtctgtggagacaaacaggctcccgtattacggaacagaccgtttcgcagttttgccgtgaaagcaaatttgccaaacttcgcatactctgccatgcccggatatttctccttgtcccagcgaaaagcaccgctgtcggtaatcacaccactgatggcgtcactgttggcattgatgtatttcgaggtcgaattgactacaatgtccgctcctttttcaatcgggcgtactaaatatgccgttgctaccgtgttatccatcacaagtggcagattatgtttgtgtgctgtctctgctaacttctcaatatccacaacgtcaagttttggattaccaatcgtctctgcgaaaatcacgcgggtcttttcattgatggcggcttccaccgcctgctcatcgtgaatatccacaaatactgttttaatgccaaatgcctcaaaatcatgaaacacatcgatggatccgccgtacaaacttgtactcgctaaaatttcctcgcccgcacggacaacatttaacagcgcattcgtaatcgctgccataccggatgcacaggcaaccgatgcaattccaccttccaatgctgtcatttcattttcaaaagccaaaatcgtcggattattaattctcgtataagaaaatccgtttgctttattatgaaacaacttttcatgctgttctgccgaagactggtaaaaagcactggaatgataaatcggagtcagtgtagcaccggtctccttatcccctttttctacctgatgcagtagtgctgtattaaatctcatggcgtcctcctctaaatgtaatcaccgcgttttgcttcattacccaaaaagacggactgctcacggatataatccgctgcccacttcgcatctgcgccctcgtcaagccagttacttaagtacgattcactcttattctgaatggtatctgcctgctttttatcaactaacaataatacaacaataccggcacgatgtaaatgtttaatcacacagtcaatatcatcattttttccaggggcatacaaatatgtatgtctgccatccagattcagaattttctcgacgtcttccacaaacgcacggtttatcttcttgtcatcttttacaaactcaactgtaattgctttctgtccattggttgctgcacgaacagttcggtccacacgtccttcgtagacactgtgctctttctcatgcacttcttccacgacaccgcaagcagaagtcatattcgtcacacggtcaatcaaaatgaattcacccatcgttttatgattcttaaattcatcgatgacaatgcggtctgccagtgaaattttgcaacttgcaatctcatttttagcaagattttttacatcctttttctcaccggtattaacatctaccgcataagaaatttctgtcacagaacaaggaattgttttcgttccgagtttaaagaagaagtttttgccacggaacaattcgtcatcgtccatccacaaaatcgtagcagtcagagtcgatgccgttttcacaccggaatctaccgtaagtacacagccgcgggaaacatccacttccctatctaactgaatggtaaccggctggccttttttcgcctctttactatccttatcaccaacataaatactttttacttttgccttttcattgcttggcagcgttgtcagctcgtctcccacatggatatttccattttctacctgtccctggaaaccacggaaggtatggtccggacggcacacacgctgtaccggcatataaaatcctttttcatgagaatcctctgccacatccacatcttccaaataagaaagaagagtcggtccttcataccagtcaatcgcatcggatttctttgttacattatctccttccgttgcggaaaccggaataatctgaattgtctgaagattcagttcaccggcaagttcttgaatctgtttttcaatttcatcaaagcgctctttgctgtaatcaaccaaatccattttattaacagcaaatacaaacgaattgattcccatcaacgcacaaattctcgcatgacgtcttgtctgaatcaaaacaccctgtgtggcatcaatcaaaataactgccaaatccgcaaaggaagcacctactgccatgtttcttgtatactcttcatgacccggcgtatctgctacaataaaacttctcttatctgtcgtaaaatagcggtatgccacgtcaatcgtaattccctgctctctctctgccatcaatccgtcaagcaagagcgaataatcaatcgcaccgccgcggcttccgactttactgtcaagttccagtgccttttcctgatcggcataaagaagttttgaatcatacaggatatgaccgatcaaggttgattttccgtcgtccacgcttccgcatgtaataaattttaataatccactcatcttagaaatacccctctctctttcttctttccatacttcctgctgcctcattatcaattactcgtgtcgttctctctgacgatacggcactaagtgtctcatcaataatttcatccaatgtagtcgccgtcgactcgcatcctccggtcagaggatagcatcccaatgtacggaaacgtacactcttatgctcaattttttcacccggacgtaatttcatgcggtcatcatccaccataataatgttgccatcgcggtaaacaaccgggcggacttttgcaaaatacaaagaaggaatctcaattttttcccgtcttatgtactgccagatatccgtctctgtccagttggaaagtgggaacactctcacttcctgatgtttctgaatctgggaattatataatttccacatctccggacgctggtttttcggatcccaggcatgatgctcatttctaaaagaaaagattctctctttcgcacgggacttttcttcatctcttcgtccgccgccaaatgctgcggtaaaaccatatttatcaagcgcctgtttcaatgcctgtgtcttcatgatatcggtgtaagcagaaccatgatcaaatggattaatgccctgctttactccttcctcattgatatattcaatcatttcaatgccaagttctttcgctcttctgtcacggaactcaatcatttctttaaatttccatgtcgtgtttacgtgcaaaaacggaaatggcggtttctccggataaaaagctttcattgccaggtgtaacataaccgaactgtcttttccaatcgaatacagcataaccggtttttcacattccgccgcaacttcgcgaatgatataaattgcctctgcctccagttcatccagatgtgataattcactcatatcgttttccttcctttcttctctcctcgttaatatttgttggactctttcgtatttagaacaatctgctcggtttcgccatcctgtctgtgtatctgccagtacagcttgtctccttttttgtcgactgtcattttgcttcccataccgccgatatcggctcctaagtagagggaaatcgcaccgaagtgacattctttcacacaagaggaacatccccagcagtccttcgggtacttgatataggctttccctgcctcattcattttaataaggcttcccggacatacctgctcgcaggctttacagcctttacagagcgcctgattcatcgtgatgctcataatgctcctcccttccaactaatttgcgggtaaatacggtgattttgccatcttccattttggaattaacatactttaaccagtcaccgctctttttaggataatctaaattttcatcaaaactgtgccatcttgtctcttttcttgcaaaaagatgagcaattaccgatttgcacacggtaagacgttctttcaattcatacacaaacatcaactcatgcatatcaccggcatttacattttcggcaagtttttctatcttttcaatcttttctttcgcgagcgcaagctgtttttcattgaattgataatgcgtggaaatacctccggcatactcatccattaccttctgcattgcctcttccagcgcttccgtctcatacataccgccttcatttgataaatagcggttgtactccgtaatctttgcatcgagagcttttttctctgcactctcatcagatgccttctctttatctctttcctcattcaattgagaaactattttcttggctgcgatttcaccttcaaccatcgcaccggtcacatatttttgcggacatccgcctgccacatctcctgcggcaaacaaaccatgaatcgtagtctctctgtcggtatcaacccagtagccgctcgctgtatggccaccgacgatataaggctcagtgccctcgatttcgacattctgctcactcggatttttacccgattcaagccatttgagtgtctggctcggtgccatgtttaagtacgcttttttcagcgactcatcctgctcttgggtaatgccctccgttctcagataacacggtccgcgcccctctaagttttccatcaccgtgccgtagacacgctccgatgtagtcagaccgtatttatcttcgtacacctctcctttggcattcacctgcttcgcaccaacaccctgagcaatcgttccggtcggtgcaattgtatctttacagcgaagtgcgataaaacgcatttcaaatgttgtcatttctgctccggcacgaattcccattgcataaccggctccggtattaaacggcggataccacattttgtggcgggaaaatcccggattattcggccggtacaaacctgccgcaccgccggtcgcacaaagcaccttctttgcccttatctcataggcggtaccttcttcaatcgaaaagccgaaagctcctttgatttcattctcctccacaatgtaatcggtaatgttaatccggtttaaaattgtgacatcctctaactcttctaccgcctttgccaaaagcggcttcatattttctccatttatttttatgttgcggtttcctctggcaacatagtttccattttcatcttttaaaataacaagtcctaagttctccattttatgtgtcacacggtttagcccttcggacatcgtcatcagcaaatcttctcttacaatgccgtccgcatctttttttgcgtactccacataatcttccggttttcttccatccacaatgtaagcattaatggcattgacaccggccgccagacagccgcttcgtttgatatttgctttttccgcaatgacaatcgaataatcggactgttcacgaatcgtaagtgccgcatagcaccctgccgttccgccgccaataataagaatgtccgtatgcaatatctttttgttctcaatctgcatggtgtatcctccccgttaaatgtaaaatacatcttctctttcctgcatctctttattttccatcaaataagtctgcttcgaatcaaagatatataatcggtaaatcaatacatgaaccgtctcgccaaccgaaacaaaatctttttccaaagaacgttctccaacaaccaaaataccattgatgtccacggtaacatccattcggtttcctcggaacacgacatctgttaccacaccggtttcagcggcactgatatagcggtccagttttccgctctttgagattttcacaaattccggacgaatgaccgcctgattggcatgttcaatccgctcgaaacctttcaatttatcataatcctcaacaaccgaagacctgccgataaatcttgctacaaacggtgttgccggacttttataaatttcaaccggcgttcccatctgctcaatcgttccatgattggtaataataatttcgtctgcaacctcgaccgcttcctcctggtcatgggtgacaaaaatacttgtaataccaagttttacgaccatctctttcaaccatgagcgaagttcggcacgcactttcgcatcaatcgcagcaaacggctcatcgagtaagagaactcttggatttggtgctaacgctctagcaaaagcaactctttgtctctgcccgccggacaactgattcggatatcgtttttccatccctgacaaaccggtcatcgccaacaattccgtaacccgttccttaatctgctttttcggcatcttctgaagcaccagtccaaatgccacattatcgtataccgtcatataacggaacagcgcataattctgaaagacaaaaccaatcccacgcttggcagccggtacatcattcacccgcttgccatcaatgtaaatatctccttcattcggattctcaagtcctgcaatcatccgcagtaaagttgtctttccgctgccggacggtcctaacagggcaactaactttcctttttccacaccaagacttacatggtcagaagcaagaaaatcaccatatttttttacaatgtttttcatttctacatacat

SEQ ID NO: 1153 - DNA, 19058 bp, unidentified
  source 1..19058: mol_type = unassigned DNA
  misc_difference 1670: note = a, c, g, or t
  misc_difference 1671: note = a, c, g, or t
  misc_difference 1672: note = a, c, g, or t
  misc_difference 1673: note = a, c, g, or t
  misc_difference 1674: note = a, c, g, or t
  misc_difference 1675: note = a, c, g, or t
  misc_difference 1676: note = a, c, g, or t
  misc_difference 1677: note = a, c, g, or t
  misc_difference 1678: note = a, c, g, or t
  misc_difference 1679: note = a, c, g, or t
  misc_difference 1680: note = a, c, g, or t
  misc_difference 1681: note = a, c, g, or t
  misc_difference 1682: note = a, c, g, or t
  misc_difference 1683: note = a, c, g, or t
  misc_difference 1684: note = a, c, g, or t
  misc_difference 1685: note = a, c, g, or t
  misc_difference 1686: note = a, c, g, or t
  misc_difference 1687: note = a, c, g, or t
  misc_difference 1688: note = a, c, g, or t
  misc_difference 1689: note = a, c, g, or t
  misc_difference 1690: note = a, c, g, or t
  misc_difference 1691: note = a, c, g, or t
  misc_difference 1692: note = a, c, g, or t
  misc_difference 1693: note = a, c, g, or t
  misc_difference 1694: note = a, c, g, or t
  misc_difference 1695: note = a, c, g, or t
  misc_difference 1696: note = a, c, g, or t
  misc_difference 1697: note = a, c, g, or t
  misc_difference 1698: note = a, c, g, or t
  misc_difference 1699: note = a, c, g, or t
  misc_difference 1700: note = a, c, g, or t
  misc_difference 1701: note = a, c, g, or t
  misc_difference 1702: note = a, c, g, or t
  misc_difference 1703: note = a, c, g, or t
  misc_difference 1704: note = a, c, g, or t
  misc_difference 1705: note = a, c, g, or t
  misc_difference 1706: note = a, c, g, or t
  misc_difference 1707: note = a, c, g, or t
  misc_difference 1708: note = a, c, g, or t
  misc_difference 1709: note = a, c, g, or t
  misc_difference 1710: note = a, c, g, or t
  misc_difference 1711: note = a, c, g, or t
  misc_difference 1712: note = a, c, g, or t
  misc_difference 1713: note = a, c, g, or t
  misc_difference 1714: note = a, c, g, or t
  misc_difference 1715: note = a, c, g, or t
  misc_difference 1716: note = a, c, g, or t
  misc_difference 1717: note = a, c, g, or t
  misc_difference 1718: note = a, c, g, or t
  misc_difference 1719: note = a, c, g, or t
  misc_difference 1720: note = a, c, g, or t
  misc_difference 1721: note = a, c, g, or t
  misc_difference 1722: note = a, c, g, or t
  misc_difference 1723: note = a, c, g, or t
  misc_difference 1724: note = a, c, g, or t
  misc_difference 1725: note = a, c, g, or t
  misc_difference 1726: note = a, c, g, or t
  misc_difference 1727: note = a, c, g, or t
  misc_difference 1728: note = a, c, g, or t
  misc_difference 1729: note = a, c, g, or t
  misc_difference 1730: note = a, c, g, or t
  misc_difference 1731: note = a, c, g, or t
  misc_difference 1732: note = a, c, g, or t
  misc_difference 1733: note = a, c, g, or t
  misc_difference 1734: note = a, c, g, or t
  misc_difference 1735: note = a, c, g, or t
  misc_difference 1736: note = a, c, g, or t
  misc_difference 1737: note = a, c, g, or t
  misc_difference 1738: note = a, c, g, or t
  misc_difference 1739: note = a, c, g, or t
  misc_difference 1740: note = a, c, g, or t
  misc_difference 1741: note = a, c, g, or t
  misc_difference 1742: note = a, c, g, or t
  misc_difference 1743: note = a, c, g, or t
  misc_difference 1744: note = a, c, g, or t
  misc_difference 1745: note = a, c, g, or t
  misc_difference 1746: note = a, c, g, or t
  misc_difference 1747: note = a, c, g, or t
  misc_difference 1748: note = a, c, g, or t
  misc_difference 1749: note = a, c, g, or t
  misc_difference 1750: note = a, c, g, or t
  misc_difference 1751: note = a, c, g, or t
  misc_difference 1752: note = a, c, g, or t
  misc_difference 1753: note = a, c, g, or t
  misc_difference 1754: note = a, c, g, or t
  misc_difference 1755: note = a, c, g, or t
  misc_difference 1756: note = a, c, g, or t
  misc_difference 1757: note = a, c, g, or t
  misc_difference 1758: note = a, c, g, or t
  misc_difference 1759: note = a, c, g, or t
  misc_difference 1760: note = a, c, g, or t
  misc_difference 1761: note = a, c, g, or t
  misc_difference 1762: note = a, c, g, or t
  misc_difference 1763: note = a, c, g, or t
  misc_difference 1764: note = a, c, g, or t
  misc_difference 1765: note = a, c, g, or t
  misc_difference 1766: note = a, c, g, or t
  misc_difference 1767: note = a, c, g, or t
  misc_difference 1768: note = a, c, g, or t
  misc_difference 1769: note = a, c, g, or t
gtgctcaaatccatattcgaggagcagatcctgcatcatgcggcggcgctggacgccgtatccgattcggcttacggcgatgcggaggtttatttgcagcgctatctgggcgaggattacaaggccggatttctccggttggtacaggaggctcggtcgaagacggatcttccggtaatcgccagcatcaattgcgtggccgataaaggcgattggatcgaatacgctacagcgatggccgatgccggagcttccgcgctggagcttaatattttcatccaacctacggacattcacgcccaggcccgcgaactggagttgaactatgcggagatcgtcggccgggtggccggtgcggtgaagattcccgtttcggtgaagctgcccatgcgcctgaccaatgtcttcgccttgtcgagcgctttgctcggttacggggcccggggtgtggtcttcttcaaccgcttcttcgagccggacgtggatgtcgagcggatgactttcgtggagagttcgccttacagcgagccgacggaattgcgcaacgtcctgcgtatggtggcgatctgctcggccgtgttgccgcagttggacctttctgtttcgacgggcgtgcacgatggcgaggctgcggtcaaagcgcttttgtgcggagccgaggcagtgcaggtctgcacggcgatccaccagaagggattcgaagtcattgccgaaatgaacgagtacatcgaccgttgggccgagcggcagggtttcggttcgctcgatgagttccgggggcgtctgaatttcaagaacgacacttcggccatgttccagcgcgtacagtatatgaagtatttcccgtcggaggcgaaatagtatttgccgaagtagtttcggttttcgataacgagcgagccgtacagttcactgtacggctcgcttttgtattggtgttttccgcttaatattcgatcttgtcgagaatcccttgcaggtaagcgatcgccacgccgtagttggtcatcgggacgcgctgggcgcgggcttgggcgacgcggctcaatacgtggcgccggttgaacatacaggcgccgcagtggatcaccaggtcgtagggcgtgaggtcggcgggaaagtccgtgccggcaaccacattgacccgcagtgcgggtccgatccgtttgcggagcatggccggaattttgacccggccgatgtcttcgcccaccggagcgtgcgtacaggcttcggcgatcagcacgcgggagtcttcacggagctgtccgatggctgccgcgctctccacgaagtagtcgatgtcgcccttgtaacgggcgaagagcaccgagaacgaagtcagcaagcttgcggcgggcttctgcgcatagacagtcgagaaaacctgcgagtcggtgataatcagtttcggcggtgcggccagcgacgagagcgtgccttcgatctggtcggtggtacagcagaccacgcggcacttcttatcgagcagctcgcggatcgtctggacttgcgggaggatgaggcgtcccttgggggcctggatgtcctgcggcatgacgagcatcaccacgtcgcctgccgaggcgaggctgcccgtgatttcgggctggttgtagtcttcgggcaggttgcggatcagggcttcgcgcagggcgtcgagtcccgtnnnnnnnnnnnnnnnnnnnnnnnnnnnnnnnnnnnnnnnnnnnnnnnnnnnnnnnnnnnnnnnnnnnnnnnnnnnnnnnnnnnnnnnnnnnnnnnnnnnntgtagtcttcgggcaggttgcggatcagggcttcgcgcagggcgtcgagtcccgtgctgttcgaggcgctgacccggagcggccgttgcccgaagagtgcttcggcctccgcatcgggcataccggcaaccaagtcggccttgctgcgtaccactaccgtcggaatatgcctttcttccaagagtcggaaccattctatttcgtcgttctgcggcacggcttcggagaggagaaggacggccaggtcggtcttctccagcatcttgcggctttgctgcacacgcagtatgccgaggtcgccttcatcgtcgaaacccggcgtgtcgatcagtacgcaaggtcccagcccgtgtatctccatcgtcttgagtacggggtcggtcgtcgtgcccggcgtcgcggaaacgacagcgctctgttggcccgtgagggcgttgatcagcgacgacttgccgctgttgcaccgcccgtagaaagcgatatgcagccgttcggcgcggggagtctgctcgttcatcgtgcgaaacttttagaagcggaaatcccgtttaccttcggcgatcgctgcgaggttcttctctgtgatgcggcgcacacgctcgttgaggagcatcggaacctctttcgcaatcatcttttcacccagggttcgggtttcgggcgatgcgtagtcttcgagatactccttgagggtcatcagggcgttgggcgtacagcagttggcgatctttccggtcttggccagcgacatgaagcggtcgcccgtgcggccttcgcggtagcaggccgtgcagaagctcggcacgtagcccagttccagcagccaacgcaccacttcgtccagcgtgcggtgatcgctcacgtcgaattgtgcggaatcctgttcggcatgcgtcgtgccggcgtaaccgccgacgctggtgcgcgagccgccgctgatctgcgaaatgccgatttccaacacctgctcgcgcgagcgctgcgattcgcgggtcgagataatcatgcccgtataagggacggcgatgcggatcacggcgacgatcttgcggaatatttcgtccgaaatggcatccgggaagtccttggtgtcgatgtcgtcggccgggcagatgcggggtacgctgatggtgtggggaccgacgccgaagcgggcttcgaggtgctcggcgtgcatgagcagtcccgtgaagtcgtaccggtaggtattcagaccgaacagtacgccgatgcccacgtcgtcgataccaccttccatcgcgcggtccatcgcttcggtgtggtaggcgtagtcgctcttcgggccggtggggtggagtgcttcgtaagcggttttgttgtaggtttcctggaagagaatgtaggtgccgatgcctgcatcgcgcagtttgcggtagttctcgaccgtcgtagccgcgatatttacgttcacgcggcggatcgccccgttcttgtgatgtacggagtagatcgtcttgatcgattcgagaatgtactcgatcggattgttgcgcgggtcctctccggcttcgagtgccagacgcttgtgacccatatcctgcagggcaatcacctcgcggcggatttcgtcctgggtgagtttgcggcgcggaatggttttgtttttctggtgatacgggcaatatacgcagccgttgatgcagtagttcgacagatagagcggcgcgaacattacgatacggttgccgtagattttctccttgatctgtttggccagcgtgaacatgcgttggttcaggtcttcgagttcgcactcgagcagcacggccgcttcgcggtgcgtgacccctttgccttcggccgctttttgcaggatcgcctcgatcagggggcggttcgcacgattttcgcgggcgtaagccagcgtttcgacgatttctccgtcatggatgaactcctccgccttggaggatgcgacttggtacatatctttgtgtttttataagctattcttgataatctccccggctccacgagatgtggcggccgatttcgttgagctcccgttccagagcggccaatccttcggcagcttcggcaccgaaggcggccttgccgtcgtagaggttgtatttcgaccgttcgtccggcggcgaaaggttgggcatcaccacgttggcaccggccaaaataccccgcatccggccgttgcccgagagggtggcgagcgcggtggtcgaagggatcagtgctgcgggacgcatcagccgcagaatcgacagcagggtgagcgttcgttcgacgcttccggccggttcgtggccgaaaggggtgtcgcggtgcgggatgaaaggtccgataccgatcatctggggttcgaactcccggatgaaaagcagatcccggaccagatcgtccaccgtttgtcccgggctgccgaccatgatgcccgtaccggtctggtagccgatctttttgagggtgtgcaggcattcgatgcggtgatcgagggacatccggacgggatggagccaacgatagtgatcgggagtgatcgtttcatgccgcagcaggtaacggttcgcgcccgcttcgaacaacgcccggtaggaggcttctgtccgttcccccagcgagagggtgatggcgcagtcgggccagcggcgacgcatctcccggatcaatccggtcagcagttcgtcgttcagagccgggtcttctccgctctgaagtacgaatgtccggaatcccagccggtagccctcttcgcagcaggccagtacggtttccggggtcagacggtagcgttctgccagacgattgctgcgtcgaatgccgcagtagcggcagtcgttgcggcagtaattgctgatttcgatcagcccccgaacgaaaactccgtttccgaaatgcacacgggcgacctcgcgggccgccctgtgcaggtattctctctcttcgggggacgcatcggtcagcagaaggcgcaactcttccggggaaagggtgcggttgcgtttcaactgatcgacgagctctttcatagccccgtcggatttagcgtttagccagttccttcgcgaattgccgtttaccggcatcgtgcaggttgtgggtgctgggacccgtgatacatccgccttcgcaggccatgacctcgatgaacttggccggggctttgcccgatttggcataggcgcggagcagggatacgtttttcttgttcaggttggagacctggatgccttcgacctgcggccggttgttgtccgccaggaagagctgtacggcgcccatcacgcctccggcctgtgcgaagccgtgggcggcccgggtcgaaacgaacggaatggggaacggatcggtggttgcgacttcgatacccaggccgtcgaaaatggagttgatctcctcgaaggtcatcacgaaatcgacgcattcgtcgcggcgtgcctccttgcgtttggctacgcacgggccgatgaagaccacttgcgcgtcggggtgtttctccttggcgatccgcgcggcgtaatacatcggcgatccggtgctcgaaatgaagggcttcatctcggggatatgcttgttggccagttcgacccacgaaggacagcaggaggtggtcatgaacgcctgtccctcctcaattttctcttcgagttccgcaccttcattgcggatggtttccatggcgccctgcgctacttcgatcacgtcctcgaaaccgatggccttaatcgcgccatatactttttccgtgggggcgttgtattgtccgagaatggccggagcgacgacggcgaccatcttttctccttcgcgcagacgctgcagcacgtcgaacacctgcgaaatttcgaagatcgctccgaacggacaactgttgatgcacttgccgcagtagatgcatttgctctcatcgatatgctccacgccgcgttcgtccttggtaatcgcctttacggggcaggcctcttcgcacggtacgggcatatagacgatggcatggtaggggcagttgctgtggcagatgccgcaactgatgcagagatcgtggttgatgaccgctttgccggcacgattgaattcgatggcgtttttcgggcagttggtggcacaggcccgggccacgcaacctttgcagaggttggtgatctcgtagttggtctgcacgcacgacgagcaggcttcgtcgattacgcagagaatattgtctttctgctgctgccctttgcgctccagggctttgcgggcatattcggacagcggggtgagttcgtcggtttcgtcggacatgtcgaaacccatcagcgggaaagatttgtatttccacacggcgcgctccttgtgtacgcagcagcgacccaaaacccgtgaggtacggggactcaattcgatcggcaagcggtcgattcgctcgacgagctggttgtctttccacaatttgatgagattggtcagcaacttgtgtctgacaatcattacgttattggtaagaggcatgtcggaataatagaatgttaaacgaaatttccgtcgcaaagataggttattacccgtatgttcacaaacaaataagtataaaaaagagagtaaatattattttcggataattttgattttcaaattttatataatatattgcaatacacatgaacggcatttatgttttgaccatctaatcctaaatattatgcttatgaaaaaattattactatttttaattggtggtatcttgttaatcggcacttatggttgtgctaattatgaagaagatttgttggacgaaatttcgccgaaacaaatgttagctactgttacgaccgaaattgagttggcggatgcggtgtatcatagagacacagtcttggatccggccgcagaatgatccgtacaggcttgagaactttcagcaggcgtacgacaatatagtatcgggtgaatcgaaaattgtcagggcatctgatgagtttgcagcaagcgcgcggagtgtgcgaaaagaattctcagcaactgccaaaacgcagttgaaactgaaagctacccactatgccttgaaaatttttccaaaaacggaagaggaacaacgaagccttgaactggacgagcagatcaagatcgcgtatacgcctttcaattatacgtcattacctgatgaggtgacccagagtcttgtgttttcgaaatcccggacacagttttgcgaggaagatgaggagaggcgttattctgtgacttacgagggcggtatgattaaggatggaccagtggagcctgtgacaattatattgcctgtattatatgccgtttggcctgtcgaaaaaccgttccctgttgaaatggattttgaaatcctttatgaagttttcctccctaaatatattactcttggtgagaatggattgagtgcggaggcaatacaaattttggagcaagaagccattgctttggctttagatgaagagagacatttaccaggtggattcccgcgcggaaaagtactatgttacgatactcatttaaagcgttatgtaccgctggagaatctaaaaatccgttttacgctgggttcgaatattgaggaggtttatacagacaaaactggatattatgctatcaacaataaattgatcgacaaccaggcaacggtaagttttgtttttcagcacgaaaaatggacgattgtcaagggttctgaggaaggaggacggatagaggaaataaagggaatttatggagaattaagaagtggtaaagatttgaactttaatattaactcttcttcggctccggatccccgctacgaaattcatcgtgcagtcaatttttatcattatggcgaacacgattttataatttctacttttgttaataacagaatatcaatagttgcattagccgttgatcctggtgggtggcaaggccgatttaattattggccgacttctgtggggagaatgccttttatacaagttggcaattgtaacaggaataatcatccgagactaataggaaccactttgcatgaattgggacattattgtcaatttcatttgcgtggcggcacattcagtgcgtacgatggtacttggaatatattgctcgaaagttatgcttcttatgccggatggcatatgggagaagcatattatttaaatcagggttggaaaaaaacatctctaaactcggatataacaggtcaagcaaggcaagaatgggattatcaaaatacaaccaataattattatactcctttgtttgtcgatttggtggatgattacaaccagggtgttggctatccttctcgctgctacgatcaaattaagatgcctcaattcgtggtgaatttgtttggagcctatagaacctggaatgattttgaaagtgcacttcgtaagtatacagggtcatattttacagaaaatcaaataaatgaatttcttttttacgagcgtagctggcttcaacgtaacggttatatataaaaatgggtttatgaggaaattcttattttttgcgttgtcggcgatatttaccgcagggactccggcaggttgcaataccgattacaatgcaatcagttattttgtgtgggtcaacgacagcgatcataagatcactcttttcgtagaatccgatttagggtgtgagttcaaaaatgaagtgatactgcctggagaaagttttactgcgatggataatggtatgggtgtttgccccgttccttcaagttacatttggaaaatgacgattattttcgacgatgggaggcttggattcacttatggtgtccgttattaccaggacgacggtcggtcgtaccctccgaattacgacgcacattacgacccttcgatcgatgataattatgtattcgaggatttgaggggtaacggtcgtcaacctaaagagcgttggacttatgtcttcaccaatgccgattacgatgcggcggaggcgatggtcccgttcgagtaaatagtttgtggctctgaaaaacgaacgcctcccgaatctgaaattcgggaggcgttcgttcgatggcggcctgtcttttggctctaacgatccagctcttggaagaagctctggaaatcggccatgaaaacgtccttgccccgcagtacttcccgcttggcgagcagctccgaaaggcggatgtagccgatcacgtaattgccgtcctcgccccgatattgctcggtgatgcggtcgaagtggaggattttcagtacgtcggtttccgtgtatcgcacataaactttcagctccacgtcggtcgtgtactccggacggtcgaggtagtgctgtttcttgtattcgtaccggtagtcgtgctgacgggccatgatgtcgctcaggatcgacgaggcggtaggcaggctgccggcgcccttgccgaacatgaactggcggtcgtagcattcgccccggatcaccacgccgttgtattcgtcatcgacgctgtagatgtatttgccgggggtgacgaattcgggcatgacgaacatcgtgaacttccggtcgctgaccttgaccacttgggcgaccagtttgatcttgacccctttttcgcgggcgtaccggatgtccgagtcgtggatagtcgagatgccgtaggtgaagatccggtcgggatggacatacactccgagcgcgtgaacggtaatgatgactaatttgaagagcgagtcgtagccttcgatgtcgaacgaaggatcgctctcggcgaatcccaatgcctgggcctgggccagcgccgcgtcgtaggactcctggtggtcgaacacccgcgaaaggatgtagttggacgaaccgttcaggatgcctttgacttcgagcagcaggtcgttgtcgtagtactcctcgaggttgcggatcacggggatcgagccgcacgacgaggcgtcgtacagcagtgccacattgtgtttcttttgcaggtcgatcagctccggcaggtggcgggcgagcatggccttgttgcccgaaacgacggggatgcctttctggagggccgccttgacgattttgtaggaggccgccgcatcgtcgatcacctccacgatcaggtcgatctccggattggagaggatcacttccggatcggtcgtgaaataggacgcgtcgatgctgcggggtttgttcgaccgcacgcagatcttgacgatttccgcatgggcgttgcgggatttgctgagtacctggaagatgccttgtccgactacgccgaagccgaaaaggccgattttgatcttattcatgggttggatggatgaaagggttgaggattcggttcagttgttcgtgctcgaccagaaacccgtcgtgtccgaacggggagtcgatctgatggtaggtgctgcgcggcagcatccggtgcagcgcctgcatttcgggcacggtgaagatgatatcggtcgaaatgccgacgaccagacattcggccgtgattcgttgcagcgccgctgccacgcctccgcgctggtagccgacgtcgtgcgtgtcgaaagcgttgaggatcttgtaataggagtaggcattataacgccggcagagcttttctccttggtactgctggtaggtgcaggcccggcgagaggagaagtcgtcgttctcgtcccgctgcgagaggtcgtagccttcgggtccccggtaggtgagcagcccgatagcccgggccgctgcgagtcccttcatgccggcagtggcgtaaggttccccgaaggtcgaatcggcttcgatggccatgcgctgcgtttcgtcgatggcgatgctccagggcgacgctttggcggccgtggcgatcaggaccagcttgccgatccgctcgggttcctggacggcccattcgaccgcctgaaagccgccgacggagctgccgaccaaggtgtggatgcggtggatgcccagaatgtcggccagcagccggtgggcccgtaccatgtcgcggatcgtcagttcggggaaatccttgtaataggggcgtccggtcgccggattgacgtgcagcggcccggtcgtgccgtagtgcgagccgaggatgttggcgcagatgatgaaatgctcggtggggtcgaggaatttgcccgcctcgaccgtgtgcggccaccacgaggccacgtccgaatcggcggtcagggcgtggcagacccagatgacattgtcgtgggccgcattcagtttcccgtaggtgctgaatgcgatcgtcagttcgggcagaatgcctccccgctccaattcgaaaggttggttatgacggtatatattcattgtgtttacagtcgttttaatgcgttgccgatctcttctttcaggtcgtcgatgtgttcgatgcccagcgagaagcgcagcatgttgggataaacgcccgaagcgaccagttcgcgttcgttgagctgggagtgcgtcgtcgaagcggggtgtaccaagaggctccgggtgtcgcccacgttggccaggtggctgatgatctccaggtggttgagcagcgaggaggcttgttcggccgatcctttgacgcggaaggtcagtacgccgccgaaaccgttggtcagatacttcttggccaaatcgtggaacgggctactcttcaaaccggggtagtttacgctctcgatcttggggtgcttctcgagccactgagccatttcgagtgcattgtccaccgatcgctgtacgcgcaacgagagggtttcgagtccttgcagcagcaggaaggagttgaacggactctggcaggcacccgtgtcgcggagcacttcgcaccgtgcccgtacggcgaaagcctggtcgccgcagttttcccagaagttgaatccgtgatacccttccgagggttcgctgatcaaggggtagcggccgttgccccaatcgaagttgccgccgtcgatagccacgccacccatgctgttgccgtgacctccgatccatttggtcgctgcgtgcagcacgacattggcgccccatttgatcggctggcaaaggtagccgccggctccgaacgtattgtcggcgattaccgcgatgccgtgtttgcggccgatttcggcgatcgcctcgaaatcggggatattgaaggccgggttgccgatcgtttcgatgtagatggcccgcgtacggtcgtcgatgagtgccgagatgctctttgggtcgtccccttgtgcgaaacggacctcgatgccgagtcggcggagcgtgtatttgaactggttggtcgttccgccgtagaggtaggaggtgcttacgatattatcgcctgcctgggcgatgttcgtgatggcgagcatttgggcggccatgcccgatgccgttgcaacggctccggtacctccttcgagggcggcgatgcgctcttcgaaaacggcggtcgtggggttgttcaggcgggtgtatatgtaccccggttccgtgagggcgaaaacggcggcgctcttttccgcactttcgaaggtgtaggccaccgtctggtggatggggacggcgcacgatccggtcgctggatcggcctgttggcctgcatgtacttgcagggtttcgaaacggagattctgttttttcatggttttgaaagttgatttatgttttcgggattgttacaaacaaaaaaatccggctgaaccagccggatttaagagatacacgtacgacgaatcttacacccggcatttacacctgcgcatcgacatcatcatacccatcatcgaaaccgaaagtccgacgatcagcgagtaagaattattggatgtaatgccgtttttcatgcgggtaaaatacgggtttgttatcgtattgatgtcgcaaatatagttatttttcgtgaaatggtgctgtcgagagaaaaatattttacaatgccattatttcgatgcaggatataaatatgattacgatctaaccggacaacttaagactgccgcatacatacaaagagcgcaaaacgacgaaaattggggcgagtcttccgcttttaacgaacgtgatattgaatatgacaaaaacggaaacattttacaaatgaaacgcacagatagtacaggaaatagattgcacgatcttgcttatatttatagaggtaatcaacttatatctttttcatgtaacgatcaagtgtacgaaggatatacctatgatgcctcaggaaatttgacttatgacccttatagtaatattcatattgagtacaatgaattgaatttaccgtctcgaatatttgacgataacaaagaagttcgctatatttacagtgccgatggtcaaaagttgaaaaccattgccgatggctcttttacatattaccgaagcacaatgatctatggcggctcaccaggttccggagaacaattgttatatattttgcatcctgaaggcatggctgtcaatgaaaatggaacttttgcatataaatataacttgaccgactatatgggtaatgtccgcacttatgcggtcgctgacagatcatcagaaactctgctggaagaacaggttctggattattatccgttcgggttggcacatagttataataacttgcataaaaaccgttatttattttccggcaaagaattgcaagatgcatccctcggccgccatggattcttggaattatacgatttcggtgcacgttactacaatcctatgtcaggacgttggtttaaccctgatccggcactgcaaacggttaatccttatcttttttgcgggaataccccaatggtatatattgatcaagacggagaattcttctttaccattctcaacgcaatcaaagacttttttcatggtttgtttacatggaattggtccagtgaaaattggcattccactgtcatggcattcaaaatcgacatgggctggttccaaggtaatttcggacaaattctttctagatttacatgggaattaccgcagacgttattcgggcatctgggcagtcaaacggaaaatttattcgaaggtgtaaaaagtgtaagctattacggtggagctactgcagtggaaacttactctgctaaatggggtggatttactctgggtagttttattatcggtcacagaggtcttcatgctgatcccaataattcactctttcaacatgagtacggacattatctgcaaagccgtgccagtggaccgctctatttgggaaaatacgcaatcccgagtttctatgatacgatgttcggacgaggaaaccataaataccattcggttgaacaagatgccaacgcacgtgccattaaatattttgaaaaaagaattcctgggtttgcggatcgaagaaataaaggaattaatgaaggatgggaccattacaagtatcctattgttgggtatgatgttcaaggcggtttttattctgctcgaagtcaagcggctcttgatcgggcacatattccggcttttgaaagtccactggatgcatttgtggccgtattatctttgaatcctgttacatcatttggaacgggagctatctatcaaactccatataacactcgaaaaaataataatgcatatataaatgaaaataaatgcagtattattacgagataatatttaaatgaatttactatgaaaaaatgggtcatatttcttattttatctattggattctgtattacaagtgtctcttgtataaaggaaagcagtacgttccattggtccgtgatggtaacgaacaaaacggagtctgcggtgtattgggcatttgcatggcccccaaattgggatctggaagttccttattatggatatattgaacctgattttaaaattctcccaaacgaaactaaaaaaatatcaattttatacggcgctaattctatcgaaggatcggtaggcaaaggcaagatgaaagtattttttctcgatgctgatatgttcgataaactttcgcaaggtccaattccggcagaggtcgtactgggaagtagaatttacactttggaagaaatacgggcaataaatttccacttttgcttccctttcgagtaaaatactttattggaaataaaagataacactgatggtaatttgattcattccatatttttgatttgaatagggtgtctaataatttagacatcctattttgttttttgttaattaaaacagtggtcattgtaaagctatatccttttaattctgctgggaagagtctaaacggctattccaatttcgaaatattgtcttaatgatgtttttctcttgctgtttcccgtcggaacgattttcactttgtcagtagcatcctctttcggttgccgtcggaaaagataggtgcccgtccgcgcctgcggcgctcgctctctccgcggcggaaaaatcatcctcgcgagggcttcggtatttttccgtcgcttcgttcgcacggtgcaccagtattctttccgaggcaaccgatccgttcgggatcgcccctcgaagaattatcgattatcgtatccgatgcaaatagactttgcatcgcatcaacacgtgagacacacggtaaaaactgtccaatcattatgacgaagacgaagaagtccgcttctcggaaatcctccctccctgccccggagacgaccactgctgcttccgcagcaccgctctcggaacaaagttcgacaacctccgctgccgcatccgaagccgtcgcgtccgcttcggagggcactcctgccgctacgccgatcgtccttctggagctgaatcggatcgtttgcagcacctataaccctcgccgcaatctgaatgagtcgtcgctggatgaactcgccctgagtatgcagcagacgggccagctgcaaccgatctgcgtacgcggcagcggcgagcactacgaaatcgtttacggggagcgccgctaccgggccgcgcagcgtgcgggcttcacacacatcaaggcccttgtctatgaacatctcacggacgaggatgcggaggacatggccatcacggagaacctccagcgtgaggacgtagcgcctctcgaagaggctgcggcgttccttcgtgcgctcaaaacgggccgtcacacagtcacaacgctcgtcgacaagttcggcaagagcgagcgttacatccgttcacacctgaagctcaacgaccttatcgagccgctcgcgaacctgctcgaacgcgaggagatcatcgaaagcatggccatcgagctggccaaatacccttcggaggttcagcagtgcgtcttcgaggagcatttcgcaaacgacggtcacaactcgtggaagaatacgtcgccccgtcaggtgggccaataccttcacgaccgctacatgaccaagctgaacacctataaattcgacaagacggagtgctcgacctgtgccgagaatacggccaacaacattctcttttcggatcttgccgaagggtgtgcgggctgcgaaaaccggtcctgcatgatccgcaagaacgacgaatttttagttgagaaagcgatccggatgcagcggaacgaccctcgcacgctgcttgccgtggaggtggggcgctattcggatgccgttctcgaacgcctcacatctcaaggttatacggtcgaggtcatcgacacctacagcatgtgggagccggacgttcccgtgcttcctgacgtcgaggttccccaagagtcggattacgaggaccgggatgagtatttagaggctctggcggagtacgaatccgaggtttcggagtaccgtgagaatatgaagaagctggatgcggagatcgacgcgggccgagtgcgtaaatatgcccttatcggtatgctggacgtcgatctgttctacgaggaggttccggagcagatcgaggagacgtccgacgacgagggcgtcacggtctatacgtcgatcgctccgcgtcccattgtcgaggagcttgagagccgcatcgttatggcacatcgctcatgctatacgcaaatgacgacggacctgaaacgagtacttcgggaaacggagatttcttcctccgctcttgcggcttccgagagccggctgtacggctattcgctgctacgcctgcttccgtcgagatacgccgagaaactgggtttggagcgcgaagccttgcaggatgtgcaacagatcggcgattttctcgatcatctggacggggatcgcatgaatatgctgatgcggtcggtgatcttcgactgcatggaccatatcgaagagttccggcagacggatgaaacgttcgagcttcaactgctgcgtcagttcgccctgcaacaggacaaggaggcgagcgagcgtgtgatcgcggagcatctggatcgcctggagaagacgcaatccagactcgaagagcagcttcacgctttggagcagcgcaaggcgcaggagttggccgccgaggtggaagccttcgatccggtggttcccgaggatcctgacatcccgcaggagaaccctgtggaggatgttccggagcctgaaggagagccgttagacccggatctgtggccggaagcgtcagcatcgcttgcggcataacagttataaataatgtcgataccgggaggagcggataaccgctcctcccggctttttattccctaaccaaaccaacaccattatgacaaaaccgagcgaacatttccgggatacgatccgggaatatctggagcagcgtgcaggcgcggatgcgcttttcgcggcctcctgtgccaaagagcataaaaacctcgacgactgcatcacctttattctgaactatgtccagcagagcggctgcaacggcttcacggatgcggagatctattcgctggccgtgcattactacgatgaggacgacatcgacgtaggcaagccgctcgattgccgcgtcgtcgtgaaccatacgatcgttctgaccgaggaggagcagcgcgaggcgcacgagcaggcgcttcgcaaagccaccgaagaagcctatgcgaagataacgcacaagagcaaatcccaacctgcgtcgaatgccgcaaacgcggcgaatcaacaaagtcttttctgagccatgaagccgagaacgaaactgcaacggcgcatcgtggcggcgagcggccgcctgccggagatcacacccgcacagctgcattggggctatgcccatcttctgccacatgaagcgttccgcaccaagaagggaaaaatcacctgcaccgaatgtcggcatacgtggcagggagatcagcaaatcgaccgtgccgtctgcccgcattgcggcgtgcgacttacagtcgtaaccacccgtcggcgcacgtcctggaataagacttacctctctgtggtcacgacaagggagggcttgcaggtcatacgctacttccttctcgaacggcgggtgcgggacggccaccccgcacgctacgaatgctgcgaggtcatgcagcgctggatcgcgcccgacggaaaatacgctaccgtagcacgcctgcgcaatacctggtattatgatgtgtggcgctgcgctacgccgctggagttgcgttcggaatgttggctttacaaccgcatgtccgtcgaacggagttatcctcgccgccgccttatccccgaattgcgaaggacgggtcttcgctacgacctttatgcggaggatcctgtcggtatcttccgctataccctcagtcagcgccacgcggaaacgctgcttaaaatcgggcgccacgacttgttccgctacttctgccgagcgggcgggcgtcggatcgaagattactggccttcgctccgcatctgcctgcgcaacggctaccgcatcgatgatgcggcttcgtggtgcgactatatcgacatgctgggccggttgggcaaggacatacataacgcgcactatgtctgtccgtcggatttccggcaggcgcacgaccgctgccatgcgcttctggcccgcatcgaggccgaggagcaggtcgcacgccggcgtgcggaatacctcgaatacgaggaacagtaccggaaggccaagggcaggtacctcggcatcgctttttcggacggagagatcgaagttcgggtgctgcaaagcgttcaggaatttatcgaggagggcaaggctatgcaccactgcgtcgagcggtatcacgacaagagcgattcgctcatcctctcggcccgcatcgcggaccggagggtggaaacggtggaggtttcgctgtcgcggttgcaggtcgtgcagtcacgcggggcgtgcaataggaacacggagtatcatgaccgcatcgtccgcctcgtgaacgacaacatgtctcttgtccgagccgcccgccataaaagagataaagctccccgtattgcaacgcttggccgcgctgcatcggacaggctgaaggtttctgcataa

SEQ ID NO: 1154 - DNA, 5080 bp, unidentified
  source 1..5080: mol_type = unassigned DNA
atgagacacaattttttgagaagaatcctgggaggaatactgaccggctgcatacttgttacggcaactgtccatgcaggaacgacacagaaagatattgataaggcaaaagaccagatcacagaccttaagaaacagaaagaagatgcgaaagatcaggtggacagcctgaccaatgaaaaacagggattggagagcgaccttagcggactgaacggacagttaaatacgatcacttccgatatgaaccagttagagcagcaggcagcgcagaaagaggacgagatcaatacggcggcggaagatctgaaacgttccgaggaacgatctgcagaacagtatgaagatatgaaagtgcgcattcagtatatttatgaaaatggcaatcagtctgtatgggacatgcttattcatgtgtcctccatcgcagaatttttaaatcaggcggaatatacaagtgcaatcaatcagtatgacagaaatatgcttacggcatatcaggagctcacggagcagatcaaaaaacagaaaaaggaactcgaggagcagaaggaagaactgactgtattacagcaggaaaaacagaaagagcaggaaaaagtcaacagcctgatcgaggatacgcagaagaagatacaggaatccagcgagaaaattgaagatgcacagtccgatgtggaatcgatcgatgcaaagatcgagaaaatgatcgaatacgaaaagcagcttgagatacagaaggcaaaagaggatgctgcgcgccttgcagccatcaaaaagcaggaacaggaaaacaggtcgaatgtgacatacgcaccggcacagagcgatgcgtatctgttagctgccatcatccagtgtgaggcatggggcgagccatatgatggaaaacttgcggtgggcagcgtgatcatgaaccgtgtcagaagctcctattttccgaatacggtttccggtgtgatttatcagggagggcagttctctccggttgccagcggtcgtcttgcataccgtctggagcagggagtcgattccgattgtatgagtgcggcacaggcggttctgggtggaatgagcacaacaaattgtctgtattttcgtgtgaataacggcattatagaaggaacagttataggtaatcatgtgttttattaaacaaaatgataaaatgataaaaatttaacaaaaaaccccgcaaaatggagcaaaaaggaagtaaaaaattgtttacaaagatgaaaaataaagaaagctattgcaattaattgtgaaatatgttagcataagaaagtacaagaaatgcagaaaaatagctgattacatagcaaataagctttttaaaatgaaagaaaaaaagataaatttcaaccgaaagtttgaatttatttttttaaaaaagattgttaaaaaattaacagcatttttcggcaactttaaagagaaagaaacaaattctctgcaaaagcagagctttgtgttaaattgaaaggagaattcaaaatggcaaagaaagtagttttagcaggtgcctgccgtaccgcaatcggtaaaatgggtggagcattaagcaatactccagcagcagacttaggtgcaatcgttatcaaagaggcattaagaagagcaggtgttaaaccagagatggttgacgaagttaaaatgggttgtgtaatccaggcagctcagggacagaacgttgcacgtcaggcttctatcaaagcaggactcccaatcgaagttccagcaatcacaatcaacgttgtatgtggttctggtttgaaatgtgtcaatgatgcagctaccatgatcatggcaggagaagctgatatcgttgttgcaggtggtatggaaaacatgtctatggcaccatatgctatgacaaaagctcgttttggatatcgtatgaacaatgcaacgatcatcgatacaatggtaaatgatgcattaacagatgcattcaaccactatcatatgatgatcacagcagagaacgtatgtgataaatatggcattacaagagaagaacttgacgagttctcagcaaacagccagcagaaatgtgaaaaagcaatcgctgaaggcaaatttgatgatgagatcgttccggttcctgttaaagtgaaaaaagagatcgttgatttcgtgaaagatgagggaccacgtgccggtacaactgctgagtctttagcaaaattaaaatgctgctccggtaaagagggcggacttgttacagcaggtaacgcttccggtatcaacgatggtgcagcagcaatcgttgttatgagtgaagaaaaagcaaaagagcttggtgttacaccaatggctacatgggtagcaggtgctcttggtggagttgagcctgaaatcatgggtgttggacctgttgcttctacaagaaaagtattagcaaaaactggtttatctattgatgatatggacttaatcgaagcaaacgaagcattcgcagctcagtctatcgcagtagcaagagatctgaaattcgatatgtcaaaagtaaacgtaaacggtggtgcaatcgcattaggacacccggtaggtgcttccggatgccgtatccttgttacattactgcatgagatgcagaagagagacgctaagagaggtcttgctacactttgcatcggcggtggtatgggatgctctacaatcgttgagagataatagttttttatagtaattcccggggaatgacttcccggggattgcatttttcaaacatacagttaacataattattttcaggaggtaaccgaaatgaaggttggcgttattggtgcaggaactatgggacagggcattgcaaaagcatttgctcaggtagaaggatatgaagtagcactttgcgatatcaagcaggagtgggctgaaggcggaaaagagaagatcaaaaaaggttatgcaagattagtagaaaaaggaaaaatgacacaggaagctgttgatggcatccttgcaaaaatcactccaggtttaaaagaagacctttgcaaagactgtgatctgatcgtagaggcagctttcgagaatatggaagtaaagaaaactactttcaaagaattagacgagatcgcaaaaccagattgtatcttcgcttccaacacatccagtctttctattacagagattggaaacggattaaaccgtccaatggttggtatgcatttcttcaacccggcagaccgtatgaaactgatcgaggttatcgctggtgtgaatactccggatgaaactgtttccgctattaagaaaatttctgaagagatcggaaaaactccggtacaggttaatgaggctgctggtttcgttgtaaaccgtatcttaatcccaatgatcaacgaagctgcattcatcaaaatggaaggtgtttccgatatcgctggtatcgatgcagctatgaaacttggtgctaaccacccaatgggaccgttagagttaggtgatttcatcggtcttgatatctgccttgctatcatggatgtactttacaaagagacaggcgacagcaaatatcgtgcatgcccactgatccgtaagatggttcgtggtggtaaccttggagcaaagagcggcaagggattctatgtatacaatgctgatcgtacaaagactccggtcgatgctcagtaaaataaatatttatggaggaaaattagatcatggatttcactttagacaagaaacatgaaatggcgcgttccttattcaaggaatttgctgaaacagaagtaaaaccgcttgcacaggaaacagatgagacagaagctttcccggcagaaacggttaagaaaatgcagaaatacggattcatgggaatcccggttccgaaagaatatggtggacagggttgtgatcctcttacatacgttatgtgcgtagaagagttatctaaagtttgcgcaaccacaggtgttgttgtatctgcacatacatctctctgcatcgatccgatcatgacatatggtacagaagagcagaaacagaaatatgtaaaaccacttgcaacaggcgagaagttaggtgcattcgcattaactgagccgggtgctggtactgatgcacagggtgcacagacaaaagctgttttagatggtgacgagtgggtattaaatggatcaaaatgcttcattaccaatggtaaagttgcagatgtttatattgtaatcgctatcacaagcatcacagaggacaagagaggcagaaagaagaaaaacttctctgcatttatcgtagataagggagctcctggtttctcattcggaacaaaagagaagaagatgggtatccgtggatcatctacttatgagctgatcttcgaagactgcagaatcccgaaagagaatctgttaggaccggaaggaaaaggttttccgatcgcaatgcacacacttgatggtggacgtatcggtattgctgctcaggcacttggtatcgctgagggcgcattagacagagctatcgcttatacaaaagagagaaaacagtttggacgttcaatcgcacagcagcagaatacacagttcaaacttgctgatatggctgcaagaatcgaagctgcacagcttttagtttacaaagctgcaatggcaaaagctactcagaaagtatattctgtagaagctgcaaaagcgaaattattcgcagcagagactgcaatggctgttacaactgaggttgttcagttattcggtggatacggatatatcagagagtacgatgtagagcgtatgatgcgtgatgctaagatcactgagatctacgagggtacaagcgaagtccagcgtatggtaatctccggtgcactgttaaagtaatttcgaatcaatccgcgtaaaatttaaacatataaaacataaggagtgaaaaatacatgaatatcgtagtatgtattaaacaggttcctgatacaaagggcggcgttaagttcaacccggatggaacgcttgacagagcagcaatgcttgctatcatgaacccagatgataaagctggtcttgaagcagcacttagaatcaaagatgagacaggagcaaaagttacagttcttaccatgggacttcca

SEQ ID NO: 1155 - DNA, 7330 bp, unidentified
  source 1..7330: mol_type = unassigned DNA
  misc_difference 2339: note = a, c, g, or t
  misc_difference 2340: note = a, c, g, or t
  misc_difference 2341: note = a, c, g, or t
  misc_difference 2342: note = a, c, g, or t
  misc_difference 2343: note = a, c, g, or t
  misc_difference 2344: note = a, c, g, or t
  misc_difference 2345: note = a, c, g, or t
  misc_difference 2346: note = a, c, g, or t
  misc_difference 2347: note = a, c, g, or t
  misc_difference 2348: note = a, c, g, or t
  misc_difference 2349: note = a, c, g, or t
  misc_difference 2350: note = a, c, g, or t
  misc_difference 2351: note = a, c, g, or t
  misc_difference 2352: note = a, c, g, or t
  misc_difference 2353: note = a, c, g, or t
  misc_difference 2354: note = a, c, g, or t
  misc_difference 2355: note = a, c, g, or t
  misc_difference 2356: note = a, c, g, or t
  misc_difference 2357: note = a, c, g, or t
  misc_difference 2358: note = a, c, g, or t
  misc_difference 2359: note = a, c, g, or t
  misc_difference 2360: note = a, c, g, or t
  misc_difference 2361: note = a, c, g, or t
  misc_difference 2362: note = a, c, g, or t
  misc_difference 2363: note = a, c, g, or t
  misc_difference 2364: note = a, c, g, or t
  misc_difference 2365: note = a, c, g, or t
  misc_difference 2366: note = a, c, g, or t
  misc_difference 2367: note = a, c, g, or t
  misc_difference 2368: note = a, c, g, or t
  misc_difference 2369: note = a, c, g, or t
  misc_difference 2370: note = a, c, g, or t
  misc_difference 2371: note = a, c, g, or t
  misc_difference 2372: note = a, c, g, or t
  misc_difference 2373: note = a, c, g, or t
  misc_difference 2374: note = a, c, g, or t
  misc_difference 2375: note = a, c, g, or t
  misc_difference 2376: note = a, c, g, or t
  misc_difference 2377: note = a, c, g, or t
  misc_difference 2378: note = a, c, g, or t
  misc_difference 2379: note = a, c, g, or t
  misc_difference 2380: note = a, c, g, or t
  misc_difference 2381: note = a, c, g, or t
  misc_difference 2382: note = a, c, g, or t
  misc_difference 2383: note = a, c, g, or t
  misc_difference 2384: note = a, c, g, or t
  misc_difference 2385: note = a, c, g, or t
  misc_difference 2386: note = a, c, g, or t
  misc_difference 2387: note = a, c, g, or t
  misc_difference 2388: note = a, c, g, or t
  misc_difference 2389: note = a, c, g, or t
  misc_difference 2390: note = a, c, g, or t
  misc_difference 2391: note = a, c, g, or t
  misc_difference 2392: note = a, c, g, or t
  misc_difference 2393: note = a, c, g, or t
  misc_difference 2394: note = a, c, g, or t
  misc_difference 2395: note = a, c, g, or t
  misc_difference 2396: note = a, c, g, or t
  misc_difference 2397: note = a, c, g, or t
  misc_difference 2398: note = a, c, g, or t
  misc_difference 2399: note = a, c, g, or t
  misc_difference 2400: note = a, c, g, or t
  misc_difference 2401: note = a, c, g, or t
  misc_difference 2402: note = a, c, g, or t
  misc_difference 2403: note = a, c, g, or t
  misc_difference 2404: note = a, c, g, or t
  misc_difference 2405: note = a, c, g, or t
  misc_difference 2406: note = a, c, g, or t
  misc_difference 2407: note = a, c, g, or t
  misc_difference 2408: note = a, c, g, or t
  misc_difference 2409: note = a, c, g, or t
  misc_difference 2410: note = a, c, g, or t
  misc_difference 2411: note = a, c, g, or t
  misc_difference 2412: note = a, c, g, or t
  misc_difference 2413: note = a, c, g, or t
  misc_difference 2414: note = a, c, g, or t
  misc_difference 2415: note = a, c, g, or t
  misc_difference 2416: note = a, c, g, or t
  misc_difference 2417: note = a, c, g, or t
  misc_difference 2418: note = a, c, g, or t
  misc_difference 2419: note = a, c, g, or t
  misc_difference 2420: note = a, c, g, or t
  misc_difference 2421: note = a, c, g, or t
  misc_difference 2422: note = a, c, g, or t
  misc_difference 2423: note = a, c, g, or t
  misc_difference 2424: note = a, c, g, or t
  misc_difference 2425: note = a, c, g, or t
  misc_difference 2426: note = a, c, g, or t
  misc_difference 2427: note = a, c, g, or t
  misc_difference 2428: note = a, c, g, or t
  misc_difference 2429: note = a, c, g, or t
  misc_difference 2430: note = a, c, g, or t
  misc_difference 2431: note = a, c, g, or t
  misc_difference 2432: note = a, c, g, or t
  misc_difference 2433: note = a, c, g, or t
  misc_difference 2434: note = a, c, g, or t
  misc_difference 2435: note = a, c, g, or t
  misc_difference 2436: note = a, c, g, or t
  misc_difference 2437: note = a, c, g, or t
  misc_difference 2438: note = a, c, g, or t
gtcagcaccaccttgcggatctcgtccatcaccgggaagatcatatccttggggatggcccgggtcaggcggacgctggtgacaggcagctcgccgcccttgaccagcaccgagctggcgatggtgcggcggggcgcagtcagctcctgacggacatactgttcgccgcgggggcaggtgtgaccggtgaccgagatcacctgaccattttcaacttcggcttcgatctcgcagccgttggggcagacgatacaggtaaattgctttttcattccaccgacacctccagtgcgcccgtttcctgcagcttggcagcagagaccttgaactggatcatctccgcaggaatggctttcttcatcttcttggcagcaacttccacaccgttctggcgcaccacgatgcggcagtcacggtagtggttccgcacgcgcagcgacaggctaaagtcgttcttgccgctgaccttctgcggaatggtgtggcccacgccctcgccgcacttcacgtccagcgtgcaggggtcgatgcccttgccctcaacgtaggcggcagcgtggcgtgccagtgcctcggactccatggaaacaaagtccaccagatcatgcacatgcagcacattgccggcagagaacacgccgggcacgttggtctgcaggttctcgtccaccacagcgccgttggtgtgggggtcaatggcgatgccggcatcctccagcagcttgttctccgggatcaggcccacggagaggatcagcgtatcacacttgtactccttctcggtgccggggatgggccgacggttcgcgtccacctcggagatggtcacgccggtcagacggtcacggccatggatctcggtgacggtgtggctgagatagagcgggatattgtagtcatccagacactgcacgatgttgcgcggcagaccggaggggtagggcatcagctcgaacactgcctgcacatgagcgccttccagcgtcatgcggcgggccatgatcatgccgatatcgccggaaccgaggatgatgacttccttgccgggcatccggttgtagaggttcatgtaagcctgcgcggtgcctgcggtgaacacgcccgccggacgctcgccgggaatgcccagtgcgccgcggctgcgctccttgcagcccatggcaagcaccacagcctttgcctgatactggcgcaggccgctgcgggtggaggcggtgacgacacgatccgccgtcaggctcagcaccgtggcgctggtctcgtaggggatctcacgcttgttcacctcatcaatgaacgcctgtgcatattccgggccggacaggctctcgccgaagcggcccagaccgaaaccgtcatggatgcactggcgcaggatgccgcccagcatcgcctcgcgctccagaatgatcatgttgcggatgccctgcttgtgcagctccaccgctgcggcaagacctgcagggccgccgccgataatcacaacgtctttctgttccatcgctcagttctcctccttccgcatattgccggtgagtacccatgacccctgacggctgtaacgcacattctccggctcggtgcccagctcctgctcaatgaagtgttcgatcttcatctggcagaagccgccctgacagccgcccatcatggcgcgggtgcggtacttgatgccggtcatggtggaaacgcccagcgggttatggatggcctgcaggatctcggccttggtcacttcctcacagctgcagatcatctcgccgtaatcggggtcctgcgcgatgagctctgcctgctgttccggcgtgcactcggcaaacttgacgatgcccttgtggtgcgggtcaaagtctgggttttcctcaaacttttcgcgctcctgcatcaggccgatgacgtagcgggccagcggcacgctgccggtcaggcccggggattcaatgcccacgaggttgacggcattgggtgccacgtcgtcccggatctccaccttccagtcctgaatggcaccgttttcatccacccacttgggctggatgccggcgaaggtgcggatctgatcctttttgaagatgtggggccacagctttgcgccctccacggccagactgtccatgttggcctgcggcacgctgtaatcgtccagcacatcggtgttctcggcatccgggcccacggtgacgttgccgtccacggtgggggtgatgtggatgcccatgtaagtgttgctgggcaccgggtacaccggcatgggcagcagcttgcccatgcgcttgtgcaggatgatgtagttgctgcgggagccgatgacacggtagccggtcaggcccagcaggtcnnnnnnnnnnnnnnnnnnnnnnnnnnnnnnnnnnnnnnnnnnnnnnnnnnnnnnnnnnnnnnnnnnnnnnnnnnnnnnnnnnnnnnnnnnnnnnnnnnnntgatgtagttgctgcgggagccgatgacacggtagccggtcaggcccagcaggtcggagatctgctttgcgcccagaccagcggcgttgaccacccagcgggtgcagaaatcgccatgggcagtatgcaggtagtacagctcattttcccgggtgatagcctctaccttgtggtcaaagaagaagtccacgccgttggcgtgtgcgttctcggccagcgccaccgtatacaggaacgggtccatgatgccgctgtttttggaccacatggcaaacttgcccaccacggctggcaccagctcgtgcagctttgcttcatcgatcatctcaaggccggtgcagccgttgacagcgccctgcttcatggtgcgctccagctgctccatgtcctcgggggtgttgcccaccagcaccttgccgcaacgcttgaacgggaagttcagctcttcggccagctgatccatgatgcggttgccttccacgcagcattttgctttcaggctgccaatggggttggcaaagccgccgtgcaccaccgcagagttgcggccactagtctcgttgcaaacatccagatttttttccagcactgcaatgctcaatttgtagcgcgaaagttcgcgtgcaatggcgctgcccacgacacccgcaccgatgatgaccacatcgtattgttttttcatggtattcacctttcttcctgatttggagatccggcttttatgttatatatttcattgactaaaatatataacatttcatgatctctgtcaagccgtttccggcaaaaaactgcacaaaaaaatgccgcatcttttggcatagatacggcatttctgaacgtgatacggttgtttcaggctttgaaatagtgtgggaatgcttcccggatcgcagaaaggttctccgtgtagcgctgcatatgctgcccggcaatgcggtgtgctgccgccgcatccttctgttcaatggctttcagcaggctgacgtgatcttcgtagatcgtttttgcgggcctgcagcggaagctgaggatggtggtgcggtcaaaatgcggagccagattttccaccagatcgtaccagtacgggcagccgcactgcacataaagcagccggtggaaccccttgtccagctcaaagattttttcttcctgtgcacgctcaatgtacatgcgccagagcgccacgttctcccacagctggtcgatatccgccggggtcagcttttcgcacgccatgcgggcgatctctgcttccagcacagcacgcagatggcgcacttcttccaccagctctgcatcgatgagagaaacataggtgccgatcttgggccggatctcaatgagccgccgctgcgccagctccagctctgcttcccggaagggggtgcggctcacccccagctgttcgcacaattccggctcgttcagtttttcacccggctccagacgggtattgataatattatcgatcaatacccgcagaacaaaactttttgcagattcatgctctctgcgctctgaaatcgtaatcatcggaaggctcctttccctcacagggaaacactgttctcagactgctgggtccagtataccacactgcacaccggcgtaaaagaggacaatatataaaaggaagaaaactgtgtcagaattgtaaaagataaaatattttaactattattcttgacttatccaacgattcggctataatggtcgtgttcgcaagaaacttcaaaaaatttagatattcaaaacaaatcaaaggagactactaccatgacgtttgaagaaatgaagaagatcgttgttgataccctgaactgcgacgaggacaaggtgaccatggaggccagcctgaccgaggatctggaggccgacagtctggatgccgtggagctgaacatggctctggaagatgcctgcggcgtgtccatcccggacgaagagctggcaaagctcaagaccgtgggcgatatctacaactacatcaccgcacatatctgaggcaaaaagcaatgaacgatatccgagatcttttccccggccgaatgcgggagcgcaccttccagctgaaggccaagcgggatgccggtgccgtctggcacgagcagcagtttgtggagtgcaagcagtgcggccgccgcgccgcacgcaccctgtgggcaagaagcctttacgtctgcccaaactgcggctaccacatgcccattggcgggtactaccggctcagtctggtgctggaccacggcagcttccgggaactggatgccgaccttgctccgcaggatgtgctgcattttccgggctaccctgaaaagcttgccgccgcccagaacaagaccggcctgcgcgaagccgctgtaacggccaccggccgcatcggcggggtggcctgcgtggctgccgtgctggacagccgctttttcatgggcagcatgagcactgccgtgggcgacaagatcacccgcgccatcgagtacgccgccgcaaagcacctgccgctggttattttttcggccagcggcggcgcgcggatgcaggagggcattttcagcctgatgcagatggcaaagaccagtgccgccatccagcgcttttcggcaaagggcgggttgtacatcagtgtgctcacccaccccaccaccggcggtgtgacggccagctttgcaagccttggtgacatcatgctggcagagcctggcgcgctgatcggctttgcaggtccgcgggtcattgagcagaccattggcgaaaagctgcctgccggattccagcgcagcgagttccagatggagcacggctttgtggatcaggtggtgccccgcagccagctgcgggataccctgatccaggtcttgcagctccatgcaggaggaaaacacgaatgatcaaggaaattttagagcagctggctccgctggatgcccagatcgccgcgctgaaaggcagcggcaacgagatggatgccatcacggcccatgcctccgagctggcagagctggctgtggaagaggacgagatcctgcgtacctgcggcccgctgaccgccgaggatcgggtatttctagcccggcacccggagcgcccccacattgatgagactgtttctgccctgttcaccgacttctttgagcagcgcggcgaccgtcagtgcaaggaagaccctgccattctgggcggcatcgcccgttttcacggattgccggtgacggtcatcggccaccgcaagggcagcacactggaagaaaatctggcctgtaactttggtatgccggggccggagggctaccgcaaggccctgcgcctgatgaagcaggccgaaaagtttggccggcccatcatcaccttcattgacacgccgggcgcttaccccggcaaggatgccgaggagcgcggtcagggcgaagccattgcacgcaacctgatggaaatgagcggcctgaccgtgccggtcattgccgttgtcaccggcgaaggctcttccggcggtgcgctggcactgggtgtggcaaaccacatcctcatgctggaaaatgccgtttactcggtgctcagccccgagggctttgccagcattctatggaaggatgcttcccgcagtggcgaagcctgcgagatgatgaagctgaccgcgcaggatctgtacagcgatggcatcgtggagcaggtgatcccggaaccgttgggcggcgcacagcgcagccacgcagccttgtttgaacagttggatgttgctttgcgggtgcacctgaaagagctgtgccgcatgagcggccgccagctggccgaccagcgctataaaaaataccgccagatcggagaaacgaggaacgcatgagtggtttacagctgatcgccaccggcggggccatccccggccgaacggtcaccaacgaagatctgagccgcatggtggataccagtgacgagtggatcaccagccgcaccggcatccgcacccggcactggtgcacggaggatgaatctgccgccacgctggccatttccgccgcaaagcaggctttggcccgcagcggccttgcccctgcgcagatcgggtgctgcatctgtgccaccctgtccgccccagacgcgacccccagtgtagcctgtcaggtgcaggcggcgctgggccttcccgaggaccggcctgcgctggatgtcaacgcggcctgttccggcttcctctacggcatagccgtggcgcggggactgctgacaactttgggtggacagtatgccctcgtcattgggtgcgaagccctttcccgcctgatggaccccgccgaccgctccacctgtgtactgtttggggatggagccggtgctgccatttttcagctgtcggacactccctttgctctgacgctgggcgcgcgcggcagcgatgttctccatgcgggcgggccgaaccgcacaggttctgcgcccatcaccatggacggcaaggccgtattccgctttgcagtggatgccctgcccaagtgcctgcacactgtgctggatgaaacacagctgaccctcgatgatcttgagtgggtggtctgccatcaggccaacagccgcatcatcgaccactgcgtgcgggcgctgaaggccgacccggcaaagttctacaagaacatggaccgccacggcaacaccagcgccgccagcatcccggtagccctgaacgagcttgccgagaacgggcagctgcagccgggccagcttctggcctgcatcggctttggcggcggcctgacatggggcggcgcaatttttcaatacaaagagtaaaaatcatgttcggcaaacgggctcgccctctcagtcaccttcggtgacagctcccccaaagtgggagcctttggcaaaaccgaaaagtttaccgtactgccaagggctct

SEQ ID NO: 1156 - DNA, 8506 bp, unidentified
  source 1..8506: mol_type = unassigned DNA
atggcagcaagaatttcaaaggcggatttcgatgaaaaagtattaaaaagcaagcttccggtaattgttgatttttactcggattcatgtgtggcctgcaagaagctggcaccggttctcggagatatcgaggatgattatgaggataagcttcacgtatacaaggtcaacacaaactttgacggagagctcgctgatgagtatgaggtgactgcgaatccgacactgcttttcgtaaaagacgcagaggtcttagacagaaaggtcggcgcacaaaagcctgccgatttgaaggcgtgggttgaagaattattatagttttagattattatataaagcagtctgatacaggataataacacatacagataccacaatctgtgacacaggaggaaataaaatgactatcacagtagcaggagagaagaaagaatataaggatggacttacattaccggagcttatcgagcttgagaatgtagatatgcctgagtatgtaacagtttcaataaatgaggaatttgttgccacagaggataagccaaagacagtgcttaaggatggcgacaatgtagagttcctttacttcatgggaggtggatgctaatggcaatgactgatgagcagatcgagcgctattcacgccacattatccttaatgaggtgggcgttaaaggtcagaagaaattattaaagggcaaggtgcttattatcggtgccggcggactcggagctccggcagccatgtatcttgcagcagcaggagttggcacaatcggtattgtggatgcggatgaggtagatttatccaacctgcagagacagattatccacggaacagccgatgtgggaaaagccaaggtaaagtcagcaaaagagacaatgaacgccatgaacccggatgttcaggtcaatacataccgtatgtttgtagatgcgtcaaacatcagagagcttatcagggattatgatttcatcattgacggaactgacaatttcccggcaaagttcttaatcaacgatgcatgcgtgcttgagaaaaagccgttttcacatgcaggaatcatccgtttcaagggtcagctcatgacatatgtgccgggagagggaccttgctacagatgtgtattcaagaatccgccaccaaaggatgcagtgcctacatgtaagcaggcaggtgttatcggagctatgggcggagtaatcggttcgcttcaggctatggaggctatcaagtatttaatcggtgtcggagagctgctcacaggatatctgcttacatatgatgcactcaccatggagttccacaagattaagcttccaaaggatacacacaactgtgcagtctgtggcgaccatccgaccattctcgagccaatcgactacgagcaggaggtctgcgaggagacagcgggcagattagatgcacctcgtacacaggaataaaaagacagtaaggaaaggaacgatatgagtatcataagaatgaaatatccgtttctggatgaaatagcaaaatatgctaaagagcatctgccggaggaggcgtgcggtctgatagcaggtagtgaggacgaaaacggtcgtctcatcacaaaggtatattacctgacgaatacagaccatgccgaggaccatttcacaatggatccaaaggagcagctggtagccataaaggacatgagagcaaacggccttaagccgcttggcaactggcattcacatccgtctagcccttcaaggccatcggatgaggatataaagcttgcatacgatccaaatgcaagctacatgataatgtcgcttatggcagaaaatcctgtaatcaactcgtttcatatcgagggtggacaggtcacgaaagaggatttacgaatatattctgatgaatattacttctaaatcatatgttaatgttttgagtcgcagcgaaagctgcaaagaaaagtcagcttcatcgaagatggcttttcttttttaaagaaagatgttattatagcatgtatatttaataaaacgaaagagcgtgcgaaaatgaaattaaaaacgaaggaacttacaacatgtgcactttttgcggcacttattgcagttggagcatttatcaagattgatattccacttcctatatacactatgcattttacattacagtggttctttgtgctgatggcgggatttctgctcggggcaaagctggcatcgcttagcgtgatagtgtatctgtgcatcggactggtgggagtgcctgtatttgcggcaggcggtggtcctacatacattttaagaccgggatttggattcctcttaggctttgtgcttgccgcatttttaatcggagctatcacagaaaagcttaaaaagaccaatgcgtttacactcattcttccggcaacggtcggactggtggcatattatacagttggagcgatatacttttactgcatgaagaatttctatgcggcaacacctgtcagctggggcatcgtaatagtagattactgtctgataactgttgcaccggactttatattatgcgtatcggcagcagtgttttctgctaagcttcgtcctgtttttgcaggaatattaaatggttacagtgtgaagaataaggtggaaaataaagcataaagcatataataaagtataaaataaggcatgaaataaagtatggatattggtattacagggagataaaaatggcgtattttccgatgtttgtggatatgacggaaagagagtgtctgatcgtcggcggtggaaatgtggcataccgcaaggtgatcgtaatgctggattttggcgcgaaggtcacggttgtggcagaggatatatgtgatgagctgagaaagcttacaattgatgatatagcaagcgaggataaaacgggctcatatacggcaaataaagaaaacaatcagacggactcggatgcagcagatagaattacgttcataaaaagaaggtttgaacgaaaagactgtgacggcatggaaatggttatcgctgccactgatgacaatgctttaaatcatgagattgcagagtattgcaaagctaaggacatcatggtaaatgcggtcgatcagaaggctgattgcagctttatttttccgtcatacataaaggaaaagaatcttgttgcggcattttcgagcggaggaaacagccctgtgctgactcagtatctgaaaggcaaagagcaggagattcttactccgtttcttggtgagctgaacgaatacatgggacagatccgcgaaaaagtaatagcgcaatatgacactcaagccgagagaaagcgtgtgtttaaagaaatattgtgtgcagctattgataatggaaggattccggaaatatagtttaaagtaaggtattacagattttaagttgttgttcatttataaattataaatggcaaatggcatgatccgtaggagagtaaaatgaggtatttaataggaacgagaggctcaaagcttgctcttgttcagactgattacgtgatagataagttaaaaagagcatatccggatgatgattttaaggctgttatcataaagacaacaggcgatttagagcagaaaaaggcactcgataagattggctcaaagggtatcttcgtaaaggagatagaggacgagcttttatcgggaaagattcatatggcagtccattccatgaaggatatgcctgatgaaccggcagcagggcttacatttgcaaaggcatggaagcgtgaagatccaagggatgttttggtgctgaaaaatgccgcttcactggatgagcttcctcatggtgccgtgataggaaccggaagcaagcgcagaaagtatcagcttttaaagctgcgtcctgaccttaaggtggttggcatacgcggaaatatcgatacgaggcttcgtaagctatatgatggtgaaattatatatgaagaggttgccgataatactgtaaataacaatgagatagctaacgaaaaacagaataagtataacgaatacaggctggatggaatcgtacttgcagcggcgggaataaaacgtatcggaagagattctgagatcacacagtacttttcagagtatgatatgattccggctccggcacagggcacactggcgcttgagctacgtgctgacaatgcagaattgatggcaaagcttgatgctttgtcagatgagaaaaccaatctgtgcgcaggcattgagagagaatttttaaagcaaatcggtggaaactgtcatctgcctgtggctgcatactgtgatattgtaagtgaaaaagaccgcggtaatgacagcaacaaaaataacaggctaaagcttattgcgatgtttggctcagaggatggaaaacagcttgcaaggacagagcaggtatgggatatgacatcagacagaaacaatattgtggagcgtgcggtgcacgatattcggtataaattagaaatcgactaaaaaaatatcaagtcataatttttaatcataataattcagtagaaaaataattaggaaaatcatgagagaaaacacaggaaaagtagtattagttggagcaggaccgggagatacgggcctgctcactttaaaaggagaaaaatatataaaacaggcggattgtctggtgtatgacaggctgtcatcaccagagtttctttcaatggcaaaggcaggctgtgagcttatttatgtgggcaaggaaaatcacaaccatgtcatgaagcaggatgccataaacgagcttttgtacgagaaatcaaaatatcatgagcttgtagtccgtttaaagggcggagatccgtatgtctttggaagaggcggagaggaagctctctacctggtagatagaaatgtagaggtagaagtggtaccgggtgtcagttcatcggttgcagcgcttgcggctgcaggaatacctatcacacacagaggcatagcaaaaggctttcaggtcatcactgcgcacagcagaaaggatgaggaggcagatatagactattcccttcttacagatgagacaatcacctgcgtatttttgatgggacttgcgcatgtaaaaagcattgcagcagggcttatgaaagcaggacgaagagcggatactccggcagcagtgatatcgaacggcacacttgccgcgcagcgcaaatgtataggaacgcttgcggatatcggagaaaaaatcgaggaagcaaagctgacatcaccggctataatcgttgtgggagatgtggtttcactgaatgacaggcttgatttctttgaaaaaagaccgctgtttggaagaaaaatcacagtaccgtatatcaaaacaaacgaattgatagcaaaattacagcagcttggagcagatgtcacaccggttaagacaggcataataaacccgataataattcctgaatttgccgataaggtaagatcagctgactggatagtttttacaagcaaaaatggtgtaagatcatttttctataatctggatctggcaggggcagacatcaggcttatagcaaatgcaaggtttgcggtggtgggaaaagctacagaaaaagagcttgcaaagcatcacataaatgcagatattattccggcagaacagaccggaaaaggacttgcaggagaattgagttcgtatatgggcgataatgatgaaatcaaagtctgcattttctcggcaaaggaggcttcacctgaccttgaggcagggcttaaagaaatatgtgaattagaaaaaattgatgcatatgtaaatgagcaggcatatgagagtattcctgaaagcattggaaacatggtaagtgaagctgtttttacaagcgcatcaaatgtggaaagattttttcatatgctgccggagaatgcatacgtggaaacagcatactcaataggtgaaaaaacaacagcagcattagagcagcacaatgtcagagagatagtacaagctgatgatagcagttatgaagcgctggtagataaaatatcttataaagatgcttttaaagattaagaatttatggtgacaaaagttatataaagttatataataaatgcaaagttatataaggttatataaacttatatacgaaacaaaaagttatataaagttatataaggggaaaacaaaatgcaaaatccatttacattatcattcgggaaaaaaccactgcaatatatatcaagaatctcacagaccaatcagatagtagagacatttaggtcagaaaatcctgcaaaccagctttttatgataaccggggtaaggggatcgggcaaaacggttatgatgaccaatatagtatcagagataaagaaggatgaggaatggctgacagttgagcttaaccctacgagagatatgcttcagagccttgcagctaagatttacagtatgcctcagatgaataaaatatttgtcaatgcaaaactggatttttcagcgtttggactgggcgtttccatagaaaatgcagcaccggttacggatatagaaaatgtgctggaattgatgcttgaaaatataaagaaacataataagcggttactcatttcagttgatgaggttatgaactgtgaatttgtaaaagtatttgtcagttcatttcagatatttctgagacaggattatcctatttttctgcttatgacggggctgtttgaaaatatatatgatctgcagaacgacaaggcacttacatttttgtacagggcgcctaagataatgcttgagccacttagctttacagcagtcaggaaacactatatggatatttttgaactggatcaaagagaggcagacaaaatggcagctcttacaaagggatatccttttgcattccaggtattgggatatctttactgggaaaacagggatgatcacacgatagaagatattttaccggaatatgatcagtgccttgatgagtatgtgtacagtaaaatctggtcggagctgtcagagcttgataaaaaaatattgttggaaatatcagtaagtggtgaagaaaaggtaaaagaaatcagagaaaaactggatatgaattcaggattattctcggtatatagagaccggctcaaaagaaagggggttatagatacctctgagtacggtaaaattactctcacacttccacgatttgaagaatttgtcaaaacgcgccaaatgtaatatactatatccaactgaaacattaacataataaaggagaagcacaatgaaagaatacagtataggtacaaagtgtgtacaggcaggctatgcagccggaaacggagagccgagacagattccgattattcagtcaactacattcaaatatgacacaagcgaggacatgggaaagctttttgaccttgaggcagagggctatttctacagcagactgcagaatccaacctgtgatacggtagcaagaaaaatcgcagctatggagggtggcactgctgccatgctcacatcatcaggacaggcagccaatttctatgccatgttcaacatatgtgagtgcggagaccatatcgtggcatcatcatccatctatggaggcaccttcaacctcatcgcggtaactatggcgaagatgggtattacagctacattcgtatctcctgatgctacagaggaggagctgaatgcagcattcagaccaaacacaaagcttatgtttggtgagactattgccaatcctgcgcttacggtgcttgatatagagctttttgcaaaggtggcacacgagcacggagtaccgcttatagtggacaataccttcccgacacctgtaaactgcagaccaattgagtggggcgcagatattgtcacacactctaccacaaagtacatggacggacacggagccacactcggcggagcaatcgtagacagcggcaaattcgactggatggcacatgcagataaatatccgggactgtgcacacctgacgacagctatcatggcatcacatatgcagagaaattcggcaaggaaggtgcgttcatcaccaaatgtacagcacagcttatgcgcgattttggttctatgcagtcaccacagaatgcatttatgctgaatcttggccttgagtcacttcatgtgcgtatgccaaagcatgtggaaaatggacaggcagtggctgaatttttggaaaatcatccaaaggttgcctatgtaaactactcagggcttccttcaaacaaatactatgagagagcacagaagtatcttccaaacggaggctgcggagtcgtatcatttggcttaaagggcggcagagaggcagcgtctgcatttatgaaggcattaaggcttggcgcaatcgagacacatgtggcagatgcgagaacctgctgcttaaatccggcaacaagcacgcatcgtcagatgaatgatgagcagcttaaggaagcaggagtgccggcagagcttatcagaataagcttaggtcttgaggacaaggtggatttgattgcagatatctcaaacgcactcgacgctataaaataa

SEQ ID NO: 1157 - DNA, 13659 bp, unidentified
  source 1..13659: mol_type = unassigned DNA
atggagaataatcccgaaatagcgcttgcatggcaattcattgaaaacacaggcactcatctttttttgaccggcaaggcaggtaccggtaagacaactttcctgcgaaaactgagggcagagagtccgaaacggatgattgtacttgcaccgacgggaattgccgctatcaatgcaggcggtgtcaccatccactcctttttccaagtacctttcgctccttatgtgcccgaaagctcattcagcgcagatggcaaggcaacctaccgttttcgttacgggaaagagaaaatcaacattatacgcagcatagatttattggtcatcgatgaaatcagtatggtccgtgccgacttgctcgattcggtggatgccgtcttgaggcggttccgcgaccggaacaaaccctttggcggcgtgcaactgctgatgattggcgacttacagcagctgtctcccgtagtgaaagacgatgagtggcagatgctgcgcaaatactatgacacgccctattttttctccagccaggctttgaagcagacggaatactgcactatagaactaaagaaagtctatcggcagaacgatgggacttttcttgaattactgaaccgcattcgcgaaaaccgttgtgacgggcaagtgctggaagccttgaaccgccggtatattcccaatttcgtaccagataaagaagaaggatacatccgcctggtgacccacaattatcaggcccaacggattaatgaccatgagctggaacaacttccgggacgctcgtatgcctttcgtgccaagattgacggaaagtttcccgaatattcctatcccacggatgaagtactggaactgaaacgcggtgcccaggtaatgtttgtgaagaacgacatctccggtgagcaccgttactacaatggcatgattggagaggtgacagccgtgtcggcagatggaattgaagtgcgcagtaagggaagcgacgctaccttcttacttcaagaggaagagtggacgaatgccaaatacgtgcttgatgaggaaaccaaggagattacagaagatattgaaggaacattccggcaatatccgctgaagctggcgtgggcgattaccattcacaaaagccagggactgacgtttgaacgtgccgtgattgatgccagtgcctcctttgcgcatggacagacctatgtggctctgagccgctgcaagacattggagggagtggtgctcagtgccccgctttctgcaaaggccgttatcagtgaccatgcagtagataccttcacgatggaggcacggagaaacgagccggacgagaaacgcttccgttccttgcagcagacctatttcctggaactgctgtcgggcttgttcgatttccagcccatggagcaggctttgcggcggtatgtgcggcttatagacgaacacttgtacaagctctttcccaagcaactcgcagcctgtaaggaggaaatggaacgttttcacgacaaagtgacgaaagtagcccagaagttcagtatccagtatacccgcctgattgatactgcgcaggactatgcagccgacccgactttgcaggggcgcatacactctaccgccacttattttcaagagcagttgcaaccgctggatgcggtgatggcgagtacggtaacttctgataataaagagttgaagaagaagctccgggatgccatggaggagctggaggaagtgtttgacatgaagactgatttgctggattatgtgctggagaatggtttccatatggcaggatacttgaagcagaaagcactgctttccattgatgattcggcttcgcagaagggtaaaggcaaagggagaagtgcttctgccaaagaagggcagggaagcagtaagcaagctgataaagagaaacgtccgcgtgagcggaaacgcgatgctgcggctgttgaagtacccacggatgtgctgcatccggaactttacaaccgcttggtagcatggcgcaatgcagaagcttccgcattagggctgcccgtatacaccgtcattcagcagaaggcaattctaggcatcagcaatctgcttccttcggataaggccatgcttgtacgcattccgtatttcggaaaaaaaggggtggagaaatatggagatgtgattctggagatggtacgtgtgtatcgcaaagagaaaggactggcagagccggagttgctgtagtcgaatctgctgccatccgcacctgcattatttaccatccgaacatcagctttattccttcctccagcgtatacggtcgataccccagtttccggcgtgccttttctatactcagcccgctgaaacggggacgtggtgtcttttcgttcatctccttcgtagtgacgggacggatgagcgagcgattcagccccaatacgtccgctacccgataagcgatgtctgcaatggtcaggcactcgctgccacagagatgatagataccgttttgcggatgacttatcagcttctccactccttgcgacacgtctcccacgaaggtgggcgtacgccattggtcggatacgacgaacacttcctcattgttccttaatctgtttgccaccagttggagcacatttccatgctgtccgggcagggcggcaccgtacaccaccactacgcgcacgatggcataatccctgcaaacggcagcgatacgtttctcaccttccagtttggtgtagccgtaataattaacgggagcgggaatatcctcctccgtatagggtcggtccgtatcaccaccgaaaacgaagtcggtggaaagatggataaaacggctgcctcccgcctcacagcattctgccagatgctccacggcagtaatgttgacggcatccgcttctgcatggtgcgtttcgcaataatcggggacggagagggcggaggtattgattacaacatccggctgtacttcctggaaaagcttttccaccgcctggcggttgcatatatccgtacggataaagcgatagtcgcccgaatgaggacagatgtcgtcgtgcagggaacagcccgttgtctggtaagactgattatgggataaatcgtccaggatgcgcctgccggtaaaaccgttggcgcctatcaccaatattttccttttcataattacgtttataaatgcgcgattgaagacagacaaaagaagcatgctggggctgccagagtcacattgtcacttcggcccctttcaatatggatagttccttccctgctgcacttcaatgcgtatgccgaaggctccgttggctgatttcagctcgaacgcccctttgaaattgttcttttcccaaggcagtgcggaagggttgggcactttccagccgtccttgtcatattcgccgtacgtatggatgcgcatgccgttcttcaaagtgaaacttcccatttgcaggttgtcggtagagccccagaagcccgtcagtccgaaggggtttgaactgaaataccgggagttgctgagtgagaatatgttcgaaaggccttgtgaataagtcacgttcgggttcaactggaagatgcggctatagtccttgctggcatccggtatctccaaggtgaatttgggaagagtgggggcagacagattcatcagccccatatccagcaggaagccgtcgtaattcttcacgtccggcagaagctccttttcagacggagacatgccttcgggagacgcttcgccatgtactgcagtacgtaccgtatcggcaggcatctcgctctgtgcgctgacggatgacatgcctgcaagtaaaatgatgatgcagaagaagattcgtttcatagttctttgttcacaatttcagttgctgtccaccgcataggggcagactgaacaaagatactcgtttccctctatttccggaaatatctttgtattatttctatttctttatacgaatggtaggggcgaagacgggcgaagtcacccttttcattttggtggggtcgtagctccgttccaggcctccgttgaggtcgagccagtccgtcactttcagttccagtaccatgccataaccgctttgcggatacatcgggttcatatatccatgaaaggagttgcttctcccgtagcccgaatactggccgaaggcatgcaggcgcatgtagggattgatgcggtaggatacggaggcattgtagcctatgtcccattgagtacctcggggggcatcccttttggcatactgggcaccggtaatggatgaaggttgggagatggaatagtgggcggcatatacccctccgctcaattcccaatgtccgtcgggactgtaataagtgactcctgcgccagcctgcatgatggagcccattgcaggataggtgttatggctgccgtacatcgtcagtacgacttccggcgagagcaggaaatcggcgaaacgctggaagtcccattcaaagatgtttttctgaaagtgtatcttcttcatgtccgtccagggcaggggctccacatagtcggagggagggagatggagatttatctcttcctgctgttcgccttgcagactttgttggggctggctttcatcaaggcccgtacgcttgttctcttttggagaaaagggaatctgctctttctttacgggaggccggttctttattgtgtcttccggaatctcgctctgtgcataggcgcagagtgaggaacagataaaagtaatgaataataactttttcataaatagtagtttagttttagtttagttcactattagtttatatcctattccccgcacattgacgatacggatgcgctcgtctccggccagtttatgccgcagtttggtgatgaacacatgcaggctgcgggagttgaagaagctgtcgtctccccagaggtcgagcaatacattctgggtgttgaccacctggttacggttctcgcaaagacgtttcagtatctcggactcgcggtgggagagttccacttccgtatccgcgttaggtgaagtcggggtgcctgcaaaagcaagtcgttgagtgacggaattgaaacggtagtcaccgatttcaaaaacggtagtttctttgggcttttcctctgtaaaggagaaagctttgcctaccagggcctttatgcggataatgagttcctgcattccgaaaggctttttcaggtagtcgttggcacccagctcaaacccttccaccacatcgttgatggtggagcgggcggtaaggaacagtaccggggtctgtttgtcggtctgccggatgcggcgcaccatttcaaagccgtccatgcggggcatcatcacgtctgccaccagcacgtcgggacggaggtcgaagaacttgcgcaatccctcttcaccgtctgctgcggtgtggatgatgaagttctgcccttccaatgtgtccttgataatcatggcgagggtctgttcgtcctcaaccagaagtacggttatcttttccataattgtcgcttttgttacaagtaatgtaaagctccttaacaagtaatgtaaagtaccctaacaaataatgttatcatatccttatcgtaaaggtacttccttttcccaactcactctttaccgatacgctgccaccatgcttctctatcatggtcttcacatagaacaatcccagcccatagcctttcacatcgtgcagattacccgtgggtacgcggtagaatttgtcgaagatgtgcttctgcttctcgggagcaataccgataccgtggtcgctgacggagatttcggtctgttcattctgcccttcgacggttaccttgcggcaatggatggccacttcggcttctccgtgcgaatatttgatggcgttgtctatcaggttgctgatgatgttgctgaaatgcgtacggtcggcaagtacgctcaaatcttccggttcgatgtccaccgatatgtggacggagctttccgctttcagcttgtgttgttcgatgagcgtttccagaatatcacgtattgcaaactcctccgggtgcaggcggaaagtcctgcggcgttccatactcatggaaagtatctgttcaaccagtccactgaggcgctgaagctgttcctggcagatacgcaggtatttgtcgcgtttggccttttcctccgcttggttgaagttgagcagagcgtcgttggcggcatatgctacggcgatgggggttttcagttcgtgggtgatgttgttggtgaaatcgctcttcatctcttccagtgtcttctgtttcaggatggtgcgtatcaggaaccagaaggagaaagcgagtacgatcagaataacgaatgatgtggtgagaatgcccgacatctgtcgcaagaccaacatgccggccggttccatgatgagacggtagctttgatttgtattgatgtcgaaagaataattatattccacggcttttgaggtaggcacatagccgggggtaccgatgtttaccaatgtatctatatagagaatggtagagtcccatttgctgcctttgtgaagatgtagcagcctatggggaagattgatgttacggtcatgcaggaatgaagtcagcaggctgtcataaagcactacgtcggggtcggaaatgatgtccagtcccgaatgcagtccgcgctggaggtaggtggcgagttccagcatactgttttggtcgcgcaaaatcacatccagtccccctttggcactcaatgcggattggggagatctgtctgagtccttgactgcttcttccagacgctctcgggcagaatcggcagacatccaacggactttatccgtttctctgtgctggtcgatgaaaagcacactgtcctctttggtgagcaaaggaacgttcttcctgacactgacttccacgcgggttgaatcgttcgggtgggtcacgtaaacactgtctcctttgggcatgaaggtttcgtgcagggtagcgttgtccaaagaatcttcacgggagatggtggtactgctacggacaaatgattttccgtcatcgctgtatccggctgatacgctgacttcaccgtggtttatgtcgtcctgcttcattttatccacgcgtatcatcatttcgttatagtcgctcatgcgcatggcttcggtgatgtccctttccatttcactgtgcatggtatggtagagccccgtcagccagtaggcttggtaggcgaagatgccggccagggagacgatgacaagtatggcaatatatttgaatggcagtttcatgtttgtttccggttacttttatacatacaaaggtaagattaatattgtgaaccctatcatccgataagactaaataacactcccgataacactggataacacttggtaagccgctgataacacaagtttctgctgattctgccgtactttgcagacgaagatttgcagaagaagaatataaacataaataaaaagaaggacatgaaacgattctatttactccctattgtatgctgtgctttgagcatcagcctttcggcacaagagaacaacggtactgcaaccacctccggtgcggacgacaaccgcatcctcagcgccgacagccttatcacgaccgatgcccgtctggacagtctttatcagaccttgccggaagtgatgattaccggtgaacgccccatcgttaaggcagcgcaaggcaagctggtgtacgacctgccccgccttatccagaacctccccgtagacaatgcctacgatgccgtgaaagagcttcccggcgtcatcgagatgaatggagggctgcagttggcaggtcagggagtcaccgttatcctggacggcaaagtaaccaccctcagcacagagcagctctattccttgctgcgcagcatccctgccagccgcatagagaaggcggaagtgatgtacaacgcccctgcacgctaccaggtgcgtggcgcacttatcaatatcaccttgaaacaatcggtaggcggccccggctcctggcaaggcgaactctatgccaagtattgccagaagcataacgaaggctttgaggaacgcgccagcctgctcttcagcaaaaataaattctcagcagattttctttactcgcacagccatggccggggctactctactaccgacaaagaggctgtgcacactctggcagacggctcagttcaccccatgacaacagatgaggtgggccgtggccgcagccatacccataatttcagggtaggggcggactataacatcgccaaggaccatcagctgagtttcgtctataacggtggctattccacctcccacaactggacgggcgtgacgggcacgcaggtgtccacaactcatggcaatagcaccgactggctgcacaacggccgtctggactatcgtacccctttcggcctcaaagccggtgccgaactgacctactaccgttccccgtccgaccagttgctgcatagccgcatgcaggacgaggaacttgacttctacaccgaagattgccaacgcatcaaccgatggaaattctttctggcccaggagcacagtctgggaaaaggttgggatttgaattacggagccatctatactaccagcatcgacaacagctaccaatattattatgaccccgaaaccggtggacaactgacctcatcggatgccttgagcaatatgaagtcccgccgccgcgagcagacctggaatatctatgcaggtttcagcaagagtttcggcgacaaacttgctttggacgcttccctggctgtggagcattacaagactcccgtctggaaccagtgggactggtatcccatcgtcaacttgaactatatgccggcaccgggacatatccttcagctctctctgagcagcgacaaggactatcccgactactgggcggtgcaggatgccgtctcttacatcggtggcggatactctgagctgcatggtaatccgttgctgaaaccggcgcaagagtatgagcttaaaatgacctatattttgaagagcaaatacatcttcagcgcttggttcaaccataccaaggactactccgtacagacgctctaccaatcttccgaacgtctggttgaaatctacaagacactcaattttgattatcagcaacaaacaggtatacaagcctctataccgtttaaggtgaagaattggttgaattctcgtcttaccctcatcggcttgtggcatcgcgaaaaggatggtgatttctgggatattcctttcgatagaaagcaatgctatggcattgcccagatgaacaatacttttactctctccaccaaacccgacttgaagctgacagtgaccggatttgtgcatagtaaagccattcagggcatctacgacctgcctacgtcgggcaatgtgaatattgccctgcgctatggcttcgccaagaacaaggccatccttaacctctactgcaatgacatttttgagacgggacagatttctccccgcatccgcttcaagacgcagaatgtgacgaatcattactcatgcttccgcgaattcggcgtatcgtttacttataaattcggtggatataaggagaagcaacgggaggcggtggatacgtcgcggttcaaatagatagaagatgcaggtggtcaggtgaaaatacggtattcttttgtactttgccacatctttcgtacttttgcaactttcaaaacattaaagttgttatttaaagaaaagactctgtatgaaatcggacattgaaatagcccgcagcatagagctgaagaagataaagcaggtggctgaaagtgtggatatcccgcgtgacgaagtagagaactatggccgttacatagccaagattcctacgcatctgattgatgaagagaaagtgaagaagagcaatctgatactggtgacggctatcacggctacgaaagcgggtatcggtaaaacaaccgtgtccatcgggctggcattggggctgaacaaaattggcaagaaagcgattgtggctttacgcgaaccctcgttaggtccttgcttcggcatgaaaggcggtgctgccggtggaggatatgcccaggtgcttcccatggagaagataaacctgcactttacgggcgactttcacgccattacctccgcacacaacatgatttccgctttgctcgacaattacttgtaccagcatcaggcagacggcttcggactgaaagaaatcatctggcggcgcgtacttgatgtgaatgaccgttccttgcggagcattgtcactggattgggaccgagcaccaacggcattaccgaggagtcgggcttcgatattaccccggcttccgaaattatggctattctctgtctggcaacggacctcgacgacctccgtcgccgtatcgaaaatattattctgggattccgtttcgatggtactcctttcacagtgaaggagttaggagtagccggtgccattaccgtactgttgaaagatgctatcaaccccaacttggtacagactaccgaaggctctgctgcttttgttcatggaggaccgttcgcaaatattgcccatggttgcaactccattcttgccacaaaaatggccatgacatttggcgattatgtagtgacggaagccggtttcggggctgacctgggtgcggagaagttctacaacatcaagtgccgcaagagcggcctacagcccaagctgacgataatcgttgctaccgcacaaggactgaagatgcatggcggtgtcagtctggaccgcatcaaggaacccaatatggaaggactgaaagagggcttcggcaatctggacaagcatgtacgcaatttgcgttcattcggccagcaggtcatcgtggcattcaaccgttttgccagtgatacggacgaggaggtggaagctatccgccgccattgcgaagaaaagcttgaggtaggttttgccgtgaacaacgcctttgccaaaggaggagagggagccgttgaccttgccaatctggtagtagatactatcgagaacaaaccatccgaaccgctgaccttcacctacgaagagagcgattgcgtggaacgtaaaatagaaaaggtagcctgcaacctctacggggcaagcgtagtgacttacagtctccactcccgcaaagttatcaaactgatagagcagatgggtatcagccattaccccgtctgtattgccaagacgcagtactccttctctgccgacccgaagatatacggtgcagtcaacaactttgagttccacatcaaggatattgtggtcaataacggtgcggaaatgattgtagccatcgccggtgaaattctccgtatgccgggattacccaagaaaccacaagccgaacacattgatattgtggacggaaatatagaagggctgagctaaacgcgcggagcgcgtttagaattaaaaattaagaattaaaaattaaaggctgcgcaatgttcgctttgaactgcgcagcctttaatttttaattcttaatttttaattctgtttgcttattaataagcaaacagcgggtattctttcatcttcgcattgacgcgtgcacgtacctctgcgatgacttgttcgttgtctacgttggacagaacggtttcaatcatctcggcaatttcgagcatcaggtcttccttggcaccacgggttgtgatggcaggagtacccaaacggatgccggaagtctggaaagccgagcggctgtcaaacggaaccatgtttttgtttacagtgatgtcggcagataccaacgctttctcggcaaccttaccggtcaaatcgggatatttgctgcgcaggtccaccagcatggagtggttgtccgtaccgccggaaacaatagtgaagccacggtccatcaaggcttgtgccaggacagcggcatttttcttcacctgcttggcatattctttccattccggttgcaggatttcgccgaaagcaacggctttggcagcgataacgtgttccagcggaccaccttggataccagggaatacagctgaatccagcaactgggacatcatcttgatttctcccttcggagttttcttgccccaggggttggggaagtccttacccatcatgataacgccaccgcgaggaccacgcagagtcttgtgggtagtggaggtcacgatgtgggcatatttcacggggttatccagttcaccggctgcaatcagtccggcaggatgagccatgtcaatcattaggatggcacctatcttgtccgcgatttcgcgcatgcgcttgtagtcccattcgcgggaataagcagaaccgccgccgataatcattttgggtttctcgcgcagggcaacttcttccatctggtcatagtccacacgtccggtttcctggttcagattgtattcgcagggagtatagataataccggaagtgttgaccagtgaaccatgggagaggtgaccgccgtgtgcaaggttcagtcccatgaatttgtcgcccggattgagcacggcgaggaatacggctgcattggcttgtgcaccggagtgcggctgtacgttggcccattctgcgccgaagatctgtttcaagcggtcgatggcaatctgctcactctggtccactacctcacaaccaccatagtaacgcttgccggggtatccttcagcatacttgttggtgaggcaggagcccattgcctgcataacctggtcacttacaaagttctctgatgcaatcagttcaatgcctttgagctgacgttggtgttctttttcgataagttcgaaaattaaatcatctcttttcattctgcttattagataagtttgataaatctgtgttctcttattaagcgcacaaatttacgggaaataaatgaataaattgaaagaaaaggaagaaatttactgtcaaaagaacactccgaaagaaaaactcagcacattgtccctgcggtgaaaacggatttcgtttttcgtgttttcgtctgcagcgttgttgtcggccggaatatcgtatgtcacgcttttggagatgttatgcagccccatgtcgtaacggaagtcgaaaaagacgcgtgagatggtgacggatacgccgacggtgaaactgagattgagcggacgcagcctttcacggatattcacctggtcgaaattctcgaagtcgatgtcacttttcctgtcccatatatagcgcactttgggtcctccaaagacggcaaggctgtacggcccctccttgatgaagttgtatccgtagatgacggggatgtctatactgtggatggacgatgtaatggaggcttcctccagccgggctcctgatgcggcgtcttcgggcagaggtttctcgaaggtgatgttgcaccggttgatgttgtaggatatttccggttgcaggaagtggcggtcgaagtttatccgcatgaaaagggaaccgaaatatcctatcttgtaattgttctgcacttcgtcaatgggtactccgttgacactgaactgggatacaaggaacaaggaagaggtgaaaccgcctttgaaaccgaaattgaccggagtttccttgcggtgtccggaatgctcttcgtcggcagtaccgggcacaaccggagtctgtccccacatcatggcggggaaggccaacagatataagcccatcaagattcgtcgcaactccat

SEQ ID NO: 1158 - DNA, 72547 bp, unidentified
  source 1..72547: mol_type = unassigned DNA
  misc_difference 52522: note = a, c, g, or t
  misc_difference 52523: note = a, c, g, or t
  misc_difference 52524: note = a, c, g, or t
  misc_difference 52525: note = a, c, g, or t
  misc_difference 52526: note = a, c, g, or t
  misc_difference 52527: note = a, c, g, or t
  misc_difference 52528: note = a, c, g, or t
  misc_difference 52529: note = a, c, g, or t
  misc_difference 52530: note = a, c, g, or t
  misc_difference 52531: note = a, c, g, or t
  misc_difference 52532: note = a, c, g, or t
  misc_difference 52533: note = a, c, g, or t
  misc_difference 52534: note = a, c, g, or t
  misc_difference 52535: note = a, c, g, or t
  misc_difference 52536: note = a, c, g, or t
  misc_difference 52537: note = a, c, g, or t
  misc_difference 52538: note = a, c, g, or t
  misc_difference 52539: note = a, c, g, or t
  misc_difference 52540: note = a, c, g, or t
  misc_difference 52541: note = a, c, g, or t
  misc_difference 52542: note = a, c, g, or t
  misc_difference 52543: note = a, c, g, or t
  misc_difference 52544: note = a, c, g, or t
  misc_difference 52545: note = a, c, g, or t
  misc_difference 52546: note = a, c, g, or t
  misc_difference 52547: note = a, c, g, or t
  misc_difference 52548: note = a, c, g, or t
  misc_difference 52549: note = a, c, g, or t
  misc_difference 52550: note = a, c, g, or t
  misc_difference 52551: note = a, c, g, or t
  misc_difference 52552: note = a, c, g, or t
  misc_difference 52553: note = a, c, g, or t
  misc_difference 52554: note = a, c, g, or t
  misc_difference 52555: note = a, c, g, or t
  misc_difference 52556: note = a, c, g, or t
  misc_difference 52557: note = a, c, g, or t
  misc_difference 52558: note = a, c, g, or t
  misc_difference 52559: note = a, c, g, or t
  misc_difference 52560: note = a, c, g, or t
  misc_difference 52561: note = a, c, g, or t
  misc_difference 52562: note = a, c, g, or t
  misc_difference 52563: note = a, c, g, or t
  misc_difference 52564: note = a, c, g, or t
  misc_difference 52565: note = a, c, g, or t
  misc_difference 52566: note = a, c, g, or t
  misc_difference 52567: note = a, c, g, or t
  misc_difference 52568: note = a, c, g, or t
  misc_difference 52569: note = a, c, g, or t
  misc_difference 52570: note = a, c, g, or t
  misc_difference 52571: note = a, c, g, or t
  misc_difference 52572: note = a, c, g, or t
  misc_difference 52573: note = a, c, g, or t
  misc_difference 52574: note = a, c, g, or t
  misc_difference 52575: note = a, c, g, or t
  misc_difference 52576: note = a, c, g, or t
  misc_difference 52577: note = a, c, g, or t
  misc_difference 52578: note = a, c, g, or t
  misc_difference 52579: note = a, c, g, or t
  misc_difference 52580: note = a, c, g, or t
  misc_difference 52581: note = a, c, g, or t
  misc_difference 52582: note = a, c, g, or t
  misc_difference 52583: note = a, c, g, or t
  misc_difference 52584: note = a, c, g, or t
  misc_difference 52585: note = a, c, g, or t
  misc_difference 52586: note = a, c, g, or t
  misc_difference 52587: note = a, c, g, or t
  misc_difference 52588: note = a, c, g, or t
  misc_difference 52589: note = a, c, g, or t
  misc_difference 52590: note = a, c, g, or t
  misc_difference 52591: note = a, c, g, or t
  misc_difference 52592: note = a, c, g, or t
  misc_difference 52593: note = a, c, g, or t
  misc_difference 52594: note = a, c, g, or t
  misc_difference 52595: note = a, c, g, or t
  misc_difference 52596: note = a, c, g, or t
  misc_difference 52597: note = a, c, g, or t
  misc_difference 52598: note = a, c, g, or t
  misc_difference 52599: note = a, c, g, or t
  misc_difference 52600: note = a, c, g, or t
  misc_difference 52601: note = a, c, g, or t
  misc_difference 52602: note = a, c, g, or t
  misc_difference 52603: note = a, c, g, or t
  misc_difference 52604: note = a, c, g, or t
  misc_difference 52605: note = a, c, g, or t
  misc_difference 52606: note = a, c, g, or t
  misc_difference 52607: note = a, c, g, or t
  misc_difference 52608: note = a, c, g, or t
  misc_difference 52609: note = a, c, g, or t
  misc_difference 52610: note = a, c, g, or t
  misc_difference 52611: note = a, c, g, or t
  misc_difference 52612: note = a, c, g, or t
  misc_difference 52613: note = a, c, g, or t
  misc_difference 52614: note = a, c, g, or t
  misc_difference 52615: note = a, c, g, or t
  misc_difference 52616: note = a, c, g, or t
  misc_difference 52617: note = a, c, g, or t
  misc_difference 52618: note = a, c, g, or t
  misc_difference 52619: note = a, c, g, or t
  misc_difference 52620: note = a, c, g, or t
  misc_difference 52621: note = a, c, g, or t
attcagatatagatacacttgagagagcggagataatacgtgacctgcgtcttgacgtatttgacgtgctcgtcggcatcaatctgctcagggagggacttgatatcccggagattacacttgttgccatactcgatgcggataaggaaggcttccttcgttcagagacctcacttatacagacgataggacgtgccgcacgtaacagtgagggccatgttatcatgtacgctgacaagattacagactccatgcgtgtcgcaattgacgagacaaagcgtcgtagaaaggtacaggaagagtacaatgaggctcacggcatcacgccacagactatacagaaatccgtgcgtgatctcatagctatctcaaagaaggtagcggccgatgagaatgctcttgacaaagatccggagtcaatgagcaaaaaagagcttgagaagcatcttgcagatatagagaaaaagatgaaaaaagcggcggcagagctcaatttcgaggcggctgctgagtacagggataagcttattatgcttaaaaacacattgagagacgtaaaataaaagcttataacatccggaagcaatttggaggaacacaaattatggcaaaaaaagaaagaaaatacatcaaaatacgaggtgccagcgaacacaatctaaagtgcgtcagtctcgacatcccgagagatgagtttgttgtttttacagggctttcaggctccggcaagtcatcactggcatttgataccatatatgctgaggggcagcgaaggtacatggagtcactttcatcgtatgcgcgtcagtttttaggacagatggagaagccgaatgtggagtctatagagggacttccgcctgccatttccattgaccagaaatccaccaacaagaacccacgttcaactgtcggaacggtcacagagatatatgattacttcagactgctttatgccagaattggaataccacactgtccgaagtgcgggcgtgccattacaaagcagacgatagaccagatggtggatgctgttatggcgctgcctgagcgcacccgtatccagcttcttgcaccggtggtcagaggccgcaagggtgagcaccagaagctgttcgagagagccaaaaagagcggatacgtgcgtgtgattgtagatggcagcatgtatgagctctccgaggatatcccgatggagaaaaatataaagcacaatattgatattgttgtagaccgtttggttgtaaagccgggcatagagaagaggcttactgattcacttgaaaatgtatttgaactgacagagggcaatgcaatagttgatattgtggatggcgaacagatgaccttttcccagaattttgcgtgccctgactgtggcataagcatagatgaggttgagccgagaagcttctccttcaacaatccgttcggagcatgcccgacctgctacggactcggctacaagatggagtttgacccgcagcttatggtgcctgactcatcgctttcaatatcagagggcgccatacaagtgatgggctggcagtcatgtacagacccaaagagctatacctatgcgacacttcgtgcgctgcatgagggctatgggcttcctctcgacacaccgattgatgatttatctgcagatatgaaaaaactgcttttttacggtggagatggcagggtgctcaaggtcagatacaagggtcagagaggcgaaggtgtctatgaccttgtatggaacggccttgtggacaatgttgagcgccgatacaaggagaccttttctgatacggcaaaggcagagtatgagcagtttatgcgcattactccgtgtacgagctgtaaggggcagagacttaagccgtcgtcacttgccgttacggttgcggacaagaacatatatgagatgacctccatgtctgtgaaggagcttgtgaagttccttgctgatatagagcttacagagcagcagcactatataggagaccagatactaaaggaaatccgtgcgagggttggctttttgcagcaggtcggtcttgactacctcacccttacccgtggcacggcaagcctttcaggcggggaagcccagcgaatcaggcttgccacgcagattggctcaggacttgtaggtgtggcatatatacttgatgagccaagtatcggactgcatcagagggataatgacaagctgctcggcgcacttatgaatcttaagaatctgggcaatactctcatagtggtggagcatgatgaggataccatgcgtgcagcggattatatcgtggatgtaggaccgggagccggttcacacggcggagagatagtggcggcaggctcgttaaaggacattataaagtgcaaaaaatcactcacaggagcatatctgagcggtaaaataaagataccggtgccacaggagaggcgcaagccaagcggatatatcacgataagaggagccagggagaataacctgaaaaatattgatgtgcagatacctcttggtatcatgacctgtgttacaggcgtgtcgggctcgggaaagagctcgctgaccaacgagatactttacaagcatctggccaaatccttaaacagagccaggtgtatcgcaggtgaccacgatggtatagatggtcttgaacagcttgataaggtcatagacatcgaccagtcaccgataggccgtacaccccgctctaatcctgccacatatacaggtgtgtttgacatgataagagacctgtttgcatcaacacccgatgccaaggcaaagggctataaaaagggccgtttcagtttcaatgtaaagggcggtcggtgtgaggcctgcggcggcgatggaatccttaagatagagatgcatttcctgcctgatgtatatgtgccgtgtgaggtctgtggaggcaaacgatataacagggagacactcgatgtaaagtacaagggcaagagtatatacgatgttcttgatatgacagtggaggaggcacttgagtttttcaaaaatgtgccaaagatccagaacaaaatccagtcgctctatgatgtcggactatcctacgtgaagctgggacagccgtccacagagctttcgggtggtgaggcacagcgtatcaagcttgccacagagcttagcagaaagagcaccggaaagaccatatatatacttgatgagcctactacggggctgcactttgcagatgtacacaagcttgtggagatactgcgcaggctctcagacggaggcaatactgtagttgttatcgagcacaacctcgacgtgataaagacagctgactatataatagatatgggacctgagggcggagacggcggcggaaccgtcatagcgcagggcacacctgaggagatatgcgaggtaaaacagtcatatacaggccggtttttgaaatcatatctggaaaaagacaaggataaactttaaaattttattaaatatgacctttttcaaaaaaaaagtttgaaaaatgggatttattgtatataataagagagtgtatgtgtaaatttaaagatatggcaggaaaggggctattaaaatggtcggatcagatatcggaatcgatttaggaacagcaagtatacttgtttatataaaaggaaagggtgttgtgttaaaggagccttcagtagtagcctttgacagggacaccaacaagattaaggcaatcggagaggaagcacgcctcatgctcggaaggacaccgggtaatatcgttgcagtcagaccgctgcgtcagggtgttatctcagattatacagttacagagaagatgatcaagcacttcatccagaaggcgcttggtaagaaaagcttcagaaagccgctcgtgagcgtatgtgtgccaagtggtgttacagaggttgagaagaaggccgttgaggatgctacatttgcagcaggagccagagatgttaagattatcgaggagccaatcgcagctgcaatcggtgcaggtattgatatttcaaagccatgcggaaatatgatagtagatatcggaggcggtacatcagatatagcagttatctcactaggtggttcggtagtcagcacatctatcaagatagccggagatgattttgatgaggcaattgtcagatacatgagaaagaagcataaccttctcatcggagagagaacagctgaggatatcaaaatcaagattggtacatgctaccctctcccacagccggagacaattgaggtaagaggaagaaaccttgtaacaggacttccaaggactattacagtcagctcagaggagacagaggaagcacttcgtgaggcaactcttcagatagttgaggcagtgcactcagtgcttgaaaagactccaccggagcttgcagccgatgtcgcagacagaggaatcgtgcttacaggaggcggttcgctgctcagaggtcttgaggagcttatcgaggaaaagaccggcatcaatacaatgactgcagagcagcctatgacatgtgttgctatcggtacaggaaagtatgtagagttccttgcaggcaagagagatgaagaattctagaatatacgttttataacaggcagccgtgagggcgatgatatgtccctgcattgcaggaatgtattgtcgcttttttgttaatattgttacaaatggggatattacagtcagggggattagtgaacaaaataaaggatattgggagaggcgtaatcaatctggtatttccaccgcgctgtccggtatgtgatggtataattggtccggttgagagatatatacacagcagatgctgtgaaaagctctttccggttgagcagccgcagtgtatgcgctgcgggaagccggttttgtctgagcgaagagagtattgtgacgactgtgcacgggcactagagcatcacaggcagatgcgggaagatgacagctacaggcagggcaaggcgctttttgcatacaagggcagcataaagcagaccatgtacaggttcaagtattcaaacagacgtgagtatgcggcttattttgcacagacagcagtggaaagatattcggactggatacagagatgtgggatagatgttattattccggtgccgatgcaccgtaaaaagatgcgccagagaggctacaatcaggcagagtgttttgcaaaggcattgtctgaaaaaacaggcataaggatggcaaaagggcttgtgcgcagagtgaaaaataccagtccactcaagacaatggggtatgttgaacgcagaaattgtctagagggggcttttcaagtggcggatagtattgtacaatatgaccaaatactaatagtagatgatatatatactacaggcagtacggcggagtcgattgggcacgagatagcaaagaaatgtcccggccgtgtatatgtgctgtgtatttgcataggacagggaagttaggagggttttatcagatgagaatatctaattgcaagggctgtggcagaatatttaatgtactgtcagatgagcagtactgcccgaactgccagaaaaaaatggatgagaaatttgatatagtaaagagatttgttgagggtaatccaaatgtgccggttgagacagtggccaaggagacggatacatccatgaagcagataaataggtggatacgtgaggaaaggctttcgttttcaccggattcatcatatggtataccatgcgagaactgtggcaggatgatacgtacaggcagattttgtgatgagtgcaagactaagctcacaaacacactacgcagtgcccttgacacaccaaagagtcaggataggcagctgtggcagcaggatgacaaaaaccgtatgagatatatcaagtaacaggtaagaggatgatttatgataaacgaagaaaaagtaagggaactgtttaatattgctctatgtgacagcaaaagcgatgacagccgtgtgcagaagcagtccgcaagctattacggatgggactatatatggaaagagggcttaaaaagcttctttacaggtacattcgcatttgcagggcttgttgtgatgtgggttgctgtcaatgcagcagagcttttggacagaatcaataagcttgattttaaggcaatgggtgtcacaataggcatactgtatattgcatttatggcggtttacatttttgtcacaattgtggtgtatactgcaagatataaggccggcagaagagaagtgcgcaaatacgcaaatcacctgaaggcagtgggcagaatatattcccgtgaggaaaagattaagcgttagggaggctttatgaacaagttactggaaattaaggataagacagtcaaattttgcggtgagtatgagcactttatacttccggttgtgagatttgccgttgcatttatcgcatttataacaatagatttgaatatcggctatatggcgaaaatcagctcgatgcttgtggcgctgcttttagcacttgtgtgtgcactgcttccggtgaatgcaatactctggattgcttcgattatgatacttttagatatgtatgcgctgtccatagaggtttttgctatcacatttgtactttttttagtactgtattttgtctattttcgttttgcaccgaaggatggcatgcttgtgatactcacacctatatgctttcagcttcacataccatctgttatgccggttgcagcaggtcttttaagaagagcttattcggttgttgcaataatatgtggcacactgttgtactatttctttgacggaatcagacagaatgcatcagcgcttgcagaggtggtagataaaaaggggcagagcactacaaagctcaatgtgacaatgggacagcttcttgacaacaaagagatgtttatagttatggcaatctttgttatcaccacactggtggtgtatcaggtcagacgattgaaaatcaacaattcatggactgttgctaccatagcaggaggactcatacagttggttgcacttgttgttgcttatctggtgctcggactgccggagaagatgatctggcttgtgctcagcactgtagttgctatttttgcaggtgttgtcatacagtttatatttatgaatcttgactatgcacgtacagaaaacgtacaatttgaggatgatgaatattactattacgtcaaggcagttccaaagaagatgattgccaaggaggaaaaggttgtaaagcactttggcaatacaggaagccttggaaagaagatcccgagacataatcaggaaaatatcagcaaagaggctattgcaaaagatctcgaaatagacgaaaatatatttgaggatgacaaatagttacatagtataagagaaaggagggcgctatggataatgtgagtggtgtattgatacgcttcaaggatcagttccttacattcacaaatgtgccgggcatcaaaatcggtgtgatagacattatagagatacttattatttcagtgctcttctatcatatacttttgtggataaagaccactagggcatggaatctgttcaagggccttattatcatactgttgtttgtgcttgttgcagcattgttccagatggatacaatactttggcttgctgagaaactctttaatataggtctcgtggcacttgttgttatttttcagcctgagcttcgaaatgccttggagaatattggtggaaagacctttttgggtgatttcttcaataccggcaggggcgagattgagaaattctctgacaagacaattgatgagctggtgcgtgcatgctttgcgatgggcagagtaaagacaggagcgctaatagtcatggaggatgagataaatctgggagagtatatcagaacaggaatagatgtggatgccatacttacaagtcagctcctcatcaatatttttgagaaaaacacaccgcttcatgacggagcggttatcgtgcgtggcaaccgtgtggtgtcagctacatgttaccttccgctatcagacagcctgtcactctcgaaggatttgggaaccagacaccgtgcagcggtcggagtcagcgaggtaagtgattcgcttactatcatagtttcagaggagacaggatcagtttctacagcatacaaggggcagattgagcacgatatagatgccgatcatctacgcacacagcttaagcttctgcagaacagacatagggagccgggtaaatttgaattaattaaaaggaggtttaagaatgggaaagaagcttctaaaaaccttcacaaataatataggctttaaaatacttgcgatagcatttgcatttatactctggcttgtggtctacaatctcaatgacccggtcaagacaaagacatttaccacaacagtcaccgtcacaggccgtgattcggttgttgacaaggggctatggcctaccatcaaggattcggaaaagaccatcagcttttcggtatcaggcaagagaagctatctgaacgagcttgatgattctgatttttacgcaaatgtcgaccttgcaaatatcatagtagataaggatgatacgaataaggcaagcgtaaaggtagatattggatgcaccaagtacagacattcgattaccttcaacggtggagaccatatgctcccgctttcggttgaaaaatatatgcagaagcagtttgaggtaaaggtatcattggatggaagtctctcaggtgcgaaagcactgggaaacaagccacaggcaaatccaaaggtagtaaagatcggagggcctgagtccattgtttcaactatagcatcggccaatgtaaatataaaggtcgatgacaataccataatatcagataatcagataactgatcgcggtgatctcactctgattgatgataatggcgatgagatagatatatcaaagcttgatgtggacagccagtatcagtctatagcagtgacagttgatgtcctaagtaccaaggaggtgcctatcaagtgtactacgacaggctcaccggcaggaggaaagagcgtgcttggagtggagctgtcagaggagtctgttatgctcaagggcaatgcagaggccttgaacaatatcacatctatagatgtgggcccaatcgatatatcgggcgcaacagatgatataagtacatctgttgacctgacaggatatctgccggatggagtttttatagtgaactcatccaaggcaaagctcagtatagatataaagattgaaacaaatgcgacttcaaccatgacgctgaacagctccaatatcacatatgacggactggaagatggatatacgcttacatttgtaacagataagagcagtgtcatagtaagcggcaccaagtctgatatagatacactttcgggaactacactgaagggtaaaattgatgtgacaggccttggtacaggtacacatacagtgacggtaaagccaaatctggatgagaccaagtacacatggggcgagataaaggttcagatagttatcggaagggaaggtgacggaggcggcacaacgggaactgatggtacaggaacagcctcgggctcaacaacaggcgatacaacatcaggcgacaccggcacaggtggttcatcgggcagcacatcgtcaggaaacaccggaaataacggctctgacagttcatcacattgatagatatataaccgaaaagaggtaataaaagtggtagcacaaaaaataataatcaagaatcctaccggattacatttacgtccggccggcaatctctgcaaagaggcaatgaaatttaaatcaaaggtaacatttatatatgacgagaaaaatgtagctaatgcaaagagtgtactttcagtgcttggagcatgcataaagtcaggcgatgagatagaacttatctgcaatggcgaggatgagagtgaggcgcttgaacaccttatacagtacatcaaggatggactcggagagtagtacacaaggaaacaggtatacatggagaaacatatatatggagaagcttttaaccatagtcgttccggcttacaatgttgaaaagtatataaagaactgtcttgactcgtttatagatttgtctgtgctcagaagtctggagatactcatagtggatgatggttccacagattctacagccagcctggcacatacctacgagcagaaatatccatacagcttcaaggtgctctcaaaggagaacggaggccatggatctaccatcaactatgcgataccgcgcgcaacaggaaagtatttcaaggtggtggatggtgatgattggctggacaagagccttttgccacaatttgtacagcttttgaagcacacgcactcggatgtcatatccaatgacttcaacctggtggatgataggacaaagaaggtcacaaagcgcagaaaggcagtgtccaactcttatcactataacagggagtggggctttgcggaggcagtcatggatccgctgattactatacattccatgaccatccgtactgatgtattgcagaagaatgacattcgtgtggatgagcactgcttctacgaggaccaggagtatatactctatcctataccatactgcacaagcatcacgttttcacctctgccactgtatcagtacagacttggaaggagtggtcagagcgtggacataaagatgatgatcaagcgtcatgaccagcatcttaaggtgcttgatgcactgtttgagtacaacaacgtgcacggcaatctgcagacctacaagaagcagtaccttgagcgcggtatagccgaggcagtcgatgatgagtaccagatttttcttgcaaagggcaatgatacaaggaacgttgagcagatgaagaggtttgacgagatgctgcgtgaggagcacccgggagtgtaccgggcgtgcagcaggaagagcgtctggatgcttagaaaaacagggtttaagatatttccgatggcagcatgggtctatagcagactgcgtggtaattaatttcatgaataggcgttaatgagtatgcaatactctttttaataatagtaatcaggacggatagaacagttaatgagtaaaatattatcaatcataataccaacatataatgcagaaaagtttctgaataaggggctgtcgtcatttctggtatgcagggatacagatgcacagacagcacagcacaactgtaaaatggcaacggagggccgctttgaggaaatagatattgacaaggctatactcgataagcttgaggtgatagtcgtaaatgacggcacacctgacggaagtgttgaagtggcacagaaatttgtggactggtatccggatacttttgtcatagtaaataaaacaaatggtggacacggttctgcaatcaacacaggcgtggagcatgtgagaggaaagtatttaaaggtggtcgatgcagatgactgggtagatacgcttgcgctaaagcacctggttgaatatctcgagcatgtagattcggatgcggtgatacaaagcttcaggtattatgacatatcaaaggatgagtacagaccggcagatgtgagtgtgcctgattttacaagagagtacaatttaaaggatatagtaaatatgtgggatgatgtatatgatggtctatcatttcacggagtgatatataacacagggttctataaagcacttggatataagctcacagagcatgtattttacgaagaccaggagtatgcaaccgttccgttttcgtatgcaaaaactgtcagatttattcaggaagagttgtatgtatacagagttggagatgtaaatcaaagtgtttcggcagcgagtcaggtgaagcgtcttccggatttggagcaggttatatttaatgtacttgaggcagagaagagctttgcaaaaatgccacagggtggaaaggaacactttatcagaaagacgtcgggcataatcacaagctattatcaaatagctttgataaaaaataccgacagacaatccggcagagcgatagtagagcagtttaacatgagactcgctcaaaaaagtgcacttatgtatgaggcagtacagcgtaaatataaagtatttcggctgtttaataagctacatgtgagcaacagcttttacgagaatcaatttgcaaagctgcttgagcttgccaaaagggttggcagagcagacagactatacagaaaataatactgactaccattgtcaaatatggtgacagacagcgatataagtggaaattaacatatagaaacaggaattagataggatatggaaacagaaaataaaaagatactatcaataataataccgacatataatgcggcaaagtttttggataaagggttatcatcatttattattgatgataactctcttttaaatatgctggacattattgttgtgaatgacggctctaccgataatagtgtggagattgcacaaaaatatgtaaataaatatcctgacgtgtaccggatactgaataaagaaaatggtggtcatggctcggcaattaatgaaggagtaaaaataataaaaggaagctattttaaggtagtagacgctgatgactgggtaaacactgatgtgttgaaagaaactatttgttatcttaaagataatgaaaataaacatgagaatttcgcagatgcagtgctgatgagctatagatcatatgtgctgcagagagaaaatactgatgagtatccatacgacgataaatatataacaaaaaatggtggaccatataatgcaggatatgtggacgagcatctgtatgatttctggtgggggctgagtctgcatggggtgatatataatacgcagttttatagaaatacaggactgacactctctgagggggtattttacgaggatcaggagttttcaataatcccaatggcatatgcagaaagtatctatgcatatgataaggcactttatgagtatagagtcggtgacgtaaatcagagcgtttcgatagaaagctcactgaagaggcttgaccattatgagaaggttatcatgaaattgattgaggcaggccgggatgcggagcactttagtataggcggaaagcagctgtggtttgataaaacaagcaaatttatcaacgattatttgcagctttgtctgattagaaacactgataaaaaacagcttagaaaaaggatgaagctgtttgtcagtcaaatcgaaaaaaagaatacagatatgtataaatgtgtaaataagaattataaagtattttgtatgttgaataaaatgcatatgagcgataaggtttatcagaactattttatacgcctgttacatattgtgcgtcattagcaagctttttgttatcataatgatgaataatatgtttaaataatcggaaaatatgtgacaaatctcacttgaggcatatataagaaagtgataaaatatggtgctgtgagaataatataaattaagataaagaggacaaagatgaagaagaaaagtataaaactcctggtagttttggcctgtgtgcttatggcattgggaatggcaggctgtggaaagaaagcatacaagacattccctgaaaagtacaagcttgcatcagttgatgtaggtggaatgactgctgacgaggcaaagaaagccataaagactgcagtaggcaagtataagatatcagtgaagcttgacgatgcatcatttgatatgacagctaaggatttgggactcaagtacaatgacaaagcagatcttcaggagctgataaatgcagctaataaggataaggagccggaaaagcaagtgaagctttttaaaatggacaagtctgatgagctggagacggctcttgtagactcttatatcactgcaaaaacgcagtcacagtctgatgctacggctcagagtgatacggatacagatgcaaatgatgacgaacaaaagaaggctgcgacagacacacagacctttgatataagatcaattgttccatatcgtgctacaatagcctacaatgcagaggcaggacaatttgagggtgttgacggtgtatcaggagatgcgcctgtgtatgacaatgcagctgcaaatcttacaagtgctgtaaagaagctgaaggataaggtggagcttacatccacaacaggatatgttgatggagaaaaggctgcagacagcgagcaggtaaagaatgccttaaaagaagccaatgcatatcttgatgtgacggtgacatgtaatttcacaccggcaacaggtgaagctgctacagaggctgtaggaaaggatcagatagcccagtggcttatagtggacaatgacggattgtcagtttcgcttgatggcgagaatatggctacatattgtacagagctagccaaaaagcatgatgtgtcaaagaagaaaacaggacagtttaagacaacaggcggaagtataataaatgtgcctgtagcatcatcaggacagactgtagatggaaacaagctgtatgaggcgattgctgaggcaataaacaataaaaagtctgcaacagtggaagcagtttacagtgaggcaaaggaagaagaaacaggtgaatatgtcacatatggtggcaattactgtgaagtggatcttaccaaccagatggtatatgtatacaagaatggagagcttgttgtatcaagtcagtgtgttacaggatgtatttcaaaaggacacggaacacctaccggagtgtattctattttctcaagagataaggatagatacttaaggggagacggatataagtcatgggttaatttctttataccattcaatggtggaattggcttccatgatgcttcgtggagaagtactttcggtggaaatatctacctgtacagcggcagccatggctgcataaatatgccttattcagctgcaaagaagctatatgagaatgtaacattagatgaaaaagtaattgtatatggtggtgttgacaaggtgaccggcaaagcacagagtcttggcggagctgactcttataatgtgacagagggcgacggagcattcaatctcggtgtgacagcagaggataatgcaaagctcacatactcaagtgataataatggtgtagtgagagtggatgagaacggtaatgtgacgatagcaggtgtcggaactgcaacaatcactgtcaagtctgaggctactacaagctataaggccggcagcaagacaattacaatcactgtaaatgcaaagccacagccaaaccagacaccatctgtgacaataggttgcggtaataaaactgtaacagagggagatgcaccattttctctcggagcaagtgcttcaaacggagcagcgctttcttaccagtcaagtgatccttcgattgcgtcagtagatggcgccggaaatgtgaccatttatagggctggtagcgtacagattacagctatagcaggtgaaatggcaggctggaatagcgcaagcagttcaataaccgttacagtaaattcaaaaccacaaccacagccggtggcaccgactgaaccatcagaacagccacagcagaactagaacagcaacaatagaacaggaacaaataaaatatagcaaatgaaaatacaacaaagaaaagtgccggaaacggcacttttctattatattgcataattatttacaaaatatgacatattcttaatattttttttgtgacttctaaaaatagacaaaagaaatgaagtgtagtaatataacataggattaaaccgaaaaataatgttacaatttgtaaagggtaggaaaatggaaaacaacgaaccaataagagatcaggaaattgaaatcgatttagtagcgctgtttcacgaattagtgaagcactggaaggcacttgtggcatcaatggtgcttcttgcagcagtatttggattatactccaagattacttttgtaccggagtatgaggcatctgcagagatgtatgtactgaccaagtcaacatctatcaccagtcttgctgatattcaggtaggctcgagtctgacaaacgactatgagtacgttatcacaggcaggacagttttatcacaggtaattgacaatctggatatggacgagacatatgagcagctcagcaagagggtttcaatagagaatccgacagatacacgtgtgctcaagattgtggttacagacactgatttagaagcttcaaaaacagtggcagatgagattgcaaaggtttcatcacagtatatcgctgacaatatggatcagtcacagccaaagattatccagacagcatatgcttcaaagacaccggtgaataataatatccttaagaatacagttataggagctgtactcggactgtttcttgctaccggcatagttgtacttggatacatgcttgacgatacaatttccaatgcagatgatatggagaccagaacaggcctcaaggtgcttgcatcacttcctgttgatgagacagagtatgatggagccaagacaaagagaagaaaaaagaagaaaactcaatcatctaaatcagacgatagcaagagtaagaagagggcagtttaatggaaacaatagttattaatcagataaaagaccagagctatacaatgaaggagtctcttcgagctcttaaaacaagcatcagtttcagtggaaagggcgtgaagtccatcctctttaccagcagcgtgccaaatgaaggaaagacaaccgtagttatggatctggctcgttcgatggcggactctaagaagtcagtccttgtagtagataccgatatgcgtaagtcagtccttgtaggacgactcagagcgaaagtggagagcggtggaaagatatacggactctcacattatctctcaggtcaggtatctttggacaaagtagtatatgcgacaaacatcaaaggagtgtttattctctttgcaggtcatgaggtgcctaatccgacagagcttcttgaaacaaaagagtttaaagagcttatcgagtttggagagaaaaattttgattacgtgcttgttgacacacctcctacaggcgctgcgattgatgcagccgtagttggaaagaatgtagacggagcagtaatagttgctgcccagaatgttacaagcagccgtgcaatcattaatacaaagcgtacacttgaggactcgggagtaaagattcttggagctgtgctcaataagtgcaggtttgaggagtctaagtatggtcattactatggaaactattatggtaattactatggcagggacgatgacgaaaagtagcaggcgcagacacatatgaatgacggagaataagtgcagatgaaaaaaaagaaaaatataattattacggcagtaatgattgtacttattgctattatagcgataatacttgtaaaggttaacagcagtaatgttaagaataaagaagttaaaggcataaagccgggtacagaggcagttaagacaaaagccgatactcagactgaggatgacagcactacagacaaatcaggtattgaggagtttgcgttatttggtgttgacagccgctcagatcagcttgataaaggaacacgttccgattccattatggtagtcagggttgatcatgatgctaagaaaatccgcatggtatctattttcagagactgtatgatgaatattgatggtcatggataccagaaggtgacacatgcacatgcgtttggcggaccggagcttgcagtagatacacttaacaaaaatctggatttagacataaagaattatgttacagtcaatttcaatacagtcggtgagattgtagatgaggtaggaggcattgtacaggatattgatgcatctgaggcaaaggtgataaacggatatattgatgaggtcaataaggttcgtggaacaagctcatcccatattgattcagccggcacatatacacttgatggaactcaggcagttgcgtattccagaatacgttatacagccggaggagactataagcgtgctgaaagacagagaacagtgctgttcaaggtttttgaatcagctaagcagatgaatacagcggcaaagattaagatggtatcagatctgattggacatgtcaatactaactataatactgatgagattctttcagtatttaaaaatcttgcagactatacagtagaggattctacagcatatccacaggtgttctatggtggaaaggttgatggtgcatgggttgaggtgcctactacacttgcagacatggctacaggagtgcatcagttccttgaaggtgatacaggctatactcctagtgcaactgtaaacgaatacagcagtgcattatcaggaaaagtaagcgggcctaataacgatttaacaaatacaaattttggggattaaatatgaacttcagacaaaatggagataagtacctcatcataatagaagtaattgcactgatagttgtgctggtatttggagcagtgcattttgtgatgccggggaataaggcgaataagaaaataacagaaagccagcaggagacacagaatcctactcaggagacggatggaattcagcaggtacaagctgatggacagcaggcagcaccggcatttactccgtcagattctgtcaagacaaagctgtcttctatgacaacagaggaaaaggtagcccagctattcattacgagacctgaggagattacaggtgtatcacagttcactcaggccggtaacaagacaaaggcagctattggtacatatcctcttggtggttttgttttcagacaggagaatttctcaggagaggctgcagttataaagatgatgagcagtctgcagtcattttcgcaggagcgactaggcgtgaatttgtttcttgcaattgatgaagaaggtggagaaagacttcctcttgcttcagctaatggatatgaggcacagcaggcaccatcacagcttggagatgctgacgcagcgggcagcagtgcaggaaagataggctcatatatggctaccaatggccttaatatgaattttggaccgacagcggatatagcatatggtgataatgcagataacgatacatatgcatttggcagcgagtcagcgactgtaggtgactgtgttgcagcacaggtaagcagctataatggtgcaggaatcaattctgtagcaaagagctttccgggaaaaggaaaggctactacagattcagcgacaggaatgctctggatgacagacaagttggaggatcttgaggcatctgattttgtgccatatcaaaaggcaattgaagcaggtgttccggcagtcatgatgggaaatgtgatttgccagagtgtgacaggagaggaaaccacgccatgctctacatcagcaggtgccgtaaactatatgagaactaccatgggctttaatggccttttgattacagatgatttatcagatgcatctcttaataaggtatgtacacaggatgaggcggctgtggcagctgttaaggcaggaatgagcatgctttatgtttcaacaggctttgagagcagttataatgcagtgttgtctgcagttaacagtggcgagataccggcagaaaaattagatgatgcagtgggaagaattctaacaacaaaaggaatttaatatatgcaaataaaagtaaatccgttatactatagagtatagcggatttctgttatatattttgtatatttaaaggagaattgttgatatgtcaaattgtttcaatccggcaaatattcttttgccaaacgattgtatagatatggaaaaatggtcagttatcgcctgtgaccagttcacaagtcaggctgattattgggatgctgtggaaaagcatgtggctgatgcaccatcaacgcttaatgttgtgtttcctgagatatatctgggaacaattacgaaacaggagaatgattgcaattcgtcaggggatggtgtcaaaaatgacaaagaaaccggcagaaaaacaaaatatgcttcaatgacagatgatgagagaatcaaatatattaataccactatggagacatatctcacagatggaaccttaaagcaagcggtggcagatggctatgtgctagttgagcgtactacggagtcaggggttcgtcttggaatagtaggacttattgatctggatgactatgatttcgacccgaaaaagaagactctcatcagagcaacagagggaacagtaatctcacgtatacctccgagagtaaaaataagagagaatgcagctattgagctgccacatgttatgctgcttgttgatgatcctatagacagacaaaagattgatggatgccagggtgctacacaggaagatgcagtaaatatagcagctgtaaagcatggaataatcgagtatgtgtatgccatcagggacactcttcgtaagctttacgatacagagctcatgcagggaggcggacatatccgcggctatgctgtcgagggtgaggcagcaaagcaggtgacagaggcattcgcagcaaaacagaatagctgtggaggctttttgtttgcagtaggtgatggaaaccattcccttgcaacagcgaagacctgctgggaaaatatcaaaaaaatcggaaaattcacagaggagcagttgaaaaaccatcctgcaaggcatgctcttgtggaaatctgtaatctgcacagtgaggcgcttgagtttaagcctattcacagactgcttacaaatgttgatgtaaaggacatactgtcgtttttcgaagctgaaatcacaaaacaaggacttgcgagcactgagggtgatgagatagtatttgagtatgttgaatcaggcgctaccgcaataaagaattccggaattaatatcacaaatagaggtgaccgcctcccggttgagatactccagggtattttagataagtatcttgagacacatggcaatgtggaaatagactatatccatggtgatgaggcacttcacggactggttaaggagactaagggatgtggaatttttcttcagtcgatagacaaaagcacattgttccctgcaataaatgcgggcggggtgctgcccagaaagacattctcaattggagaagcgaatgagaagagatactatatggagtgccataagatatctatgtagctttggtttatatacatatgttggttttatcatatttataaacaattgattttatgaagtagaataatttaacgaataagcttattttactacacaaacatatttattaagtgtataatataagaaaaatttattcacaaggggacgacaatgggaaaatactttggaacagacggcttccgtggagaggctaatgtcaatttaacagcagagcacgcatatcagattggtagatttttaggctggtattatggagagcttaagaagcagaagcagctcgacgagccggcgaagatagtaataggaaaggatacaagacgttcaagctacatgtttgagtattcacttgtatcaggacttacagcatcgggagcagatgcatatctattacacgttaccacaactccatcagtggcatatgtagcaagaaccgatgattttgactgtggtatcatgatttcggcaagccataatccatactatgacaatggaataaagcttatcaacagcaatggagagaagatggatgaggagacaattctccttgtcgaggactatatagacggcaagctacgcctgtttggtcaggagtggaaggaattgccttatgcacataaggatgctatcggatgcacagttgactatgtagcaggccgtaaccgttacatgggatacctcatatcgcttggtgtctactcattcaagggcatgaaagtaggccttgactgtgccaacggaagctcatggaacatggcaaagtctgtttttgaggcactcggagcaaagtgctatgtcatcaacaatgagccaaacggtctaaacatcaacaataatgcaggctctacacatatcgagggcttacagaaatatgtagtggacaatggacttgatgtaggcttcgcatacgatggagatgcagacagatgtctttgtgtagacgaactgggcaatgtaattacaggagaccatatcctctatatctatggaaagtacatgaaagagagaggaaagcttgataacaatactgttgtcacaactgttatgtcaaactttggactctacaaggcatttgatgagataggaatcggctacgcaaagactgcagtaggtgataaatatgtatatgagtatatgcagcagaacggctgccgcatcggcggagaacagtcaggacatatcatcttctctaagtatgcatcaacaggtgatggtatccttaccagccttaagatgatggaggtcatgatggcgagaaaacagaagatgagccagctctgtgagggacttagtatctacccacaggtacttcagaatgtgcgtgtggctgacaaggctgaggcacttgccaatccggaggttcaggcgactgtcgaccaggttactgcagagctcggcgatacaggtcgtattctggtgcgtgagtcgggtacagagcctgttatccgtgttatggttgaagcagagagtgaggaaatctgtcagaaatatgtggatatggttgttgcaaaattaaaataaaggttaatgccaaagataatacacgtaatatacaaaagctgtgtgagaatatcatgcagcttttgctgttatgagggttcataaatgagtgaattaagataaattaagtggatataatttaatctgtagagagaatagtaattaaattctgccggaggaaatagtctatgcctgaaatcttaattatttttatattatgtgccggtattattgtaattggcataatattgtgtataattattaaagtgagtcatatgtctgatgacgaacagaaaaaggacgatgaacgacagctggagttcattcgcgcctacaaggagcataaaaaaggacattgagtttaaaggattatataataagagacatacaggaaaagttcaaatatcttccgtcagcggtatatttggctttaatctgcattgcgatgtatatttttgtgtgtctgctgagatatcttttcacaatgagagaggtatcacaggcagatgagagaagaaaaaagatagtgggcaaaatctggcatatgctgttctgcggcacctttgtggcctatatgtatacgcttataatgatagtgtattattcaagggagccgggaagcagaaccggcgtcgccgatatggtgctgtggagcacatggggcatgacacttcagatgcacgcttattttatagaaaatatagtattgtttataccatttgggcttttatttccactggtttttaaaaattggatgagatggtttacaatacctgttggtgctcttataagcgcagcaattgagtacacgcagctggttaccggcaggggatattgtcagcttgatgattttgtgacaaatacggcaggagcagcaatcggattttttatttatttgatattatatgcagggtggctggtatggaaaaaaataagataagcattgtggtaccatgctttaacgagaaagaggctctgcctcttttttataataaaataactcaggtgtttaatcagatgagtcaagagagtgagacagcgggattgtcctatgaactgattatagtggatgacggttctatggacgggacactcgatgtcgcaaaggagcttgctgtaaatgattccggtgtgaaatacatatccttttcacgcaattttggcaaggaggcagccatgtatgcaggcttgcagcatgctgtgggggaatatgtggcgataatggatgctgaccttcaagatccgccggatatgctgcctgagatgtacaaggctcttatggaagaaggttatgatgctgtcggtacaaggcgagtgacacgcaaaggtgaaccagcgattagatctttttttgccagaaagttctataggctcatgagcagaatatcaaaggcaaatatggttgatggggcacgtgactacaggctgatgaacaggaaatacgtggatgcactgctttcgcttaaggaatacaacaggttttcaaagggattgtttggatgggtaggctttaaggtgaagtggcttgagtttgagaatgtaaacagggtggcaggtgagacaaagtggtcattctggcaactctttttgtatagccttgacggaatagtggcgttttccaacgctccgctatacatggcttcaatagccggagtgttcagctttattgtcgcaataattgcaatgctctttatcattatcaggagacttgtattcggagatccggtagccggctgggcttcgaccgttgttatcatactttttataggtgggatacaactgcttagcataggcattttgggactttatctgtcgaagctatatctcgaggcaaaggacagaccgatatatttaataggagaatcaaatatagaaaaacctacagaaaaaaattaaggctttcttaagaattcttaattcgatagcacatgacatttttttcggatgttatatgctataattttttcggcaacgtttattaatgcatgaaagaggactaagatgaaaaatgtactggagtggcttgaggccacagtagaaaaataccctgacaagcctgcattttcggatactgaatgcagcattacgtttgcgcaggtgtatgatatagcaagaaatacaggagcatatctgatagaacagcttggagtggacagaacccctgttgcagtatttgccggaaggaaaatggtaacaccggcatacttcctgggagtggtatatgcaggcagaccgtatgcgccgattgatgcatcgcttcctgacaagagaattgaaaaaatacttgaaaatctgtgtccaagggctattgtggctgacagggaaagccttgagcatgtggagagcatagtggatgagctggcaaaggcagaaggtttcgatagaccgcagatatttattgctgagaatatatcgcgcttcgagcaggtggcgtgcgctgatagtaattgtaaaatcagtgaatcagcaggagacgctgtgacggataatgagaacgatacagatggtggtgttgtggcaggctgtgcaggaaaaatagatgacagctcacgggatatgctcgctgtagtccgcaggcagatgtccatgacagacccactgtatatcatctacacgtcaggctccaccggcaatccaaagggagtcatgacatcgcatctgtcacttatgacatacatcaatgcatattgtgatgtgatgcatatagaggaaagtgatgcgctaggcaatcagtcgccgcttgactatattgcggcaatcagggacatttatctgccgctaaagaccggttgcagcacagcgattattccaaaagagtattttatggagccaaatgccctgtttgattacatgaatgataagaaggtcagcagtgtcggctggagtgtttcggcatttaccatcctcacatcgcttggggcatttgaggaagtagggcttaagagtctcagaaaaatctgcttctcaggctcagtaatgccatgcagggtgctcagaaaatggcaggaaaatctgcctgaagcacattttgtgaaccagtatggaccgacagaggccacagcatcatgcacatattatagcgtggatcatacagtggaagaggacgaggtgcttcctataggaaaagcctatgacaattacagggttttcctgatagatgagcatggaaatgagccggctgtaggagaacagggcgagatatgcgtatgtggaccaatcctggcgctgggttattataatgatccggagaggacagctgcggcatttacactcaatccactcaacagggcttatcctgagcggatgtaccgcacaggggattacggaaggctcgatgaggacggcatacttcatttctgtggacgtatggaccgccagataaagcacatgggacaccgtgtggagcttgacgaggtggagcatgccgccaatgtggtcgatggagtcgcagaaagctgcgttatatataataaagcaaaagaggtgctgatacttttctacacaggtgactgtgacaggagaagccttgcgttggcactgagggacgagctcccgggctttatggtgccaaggaaaatcaagaagctggagcagcttcctaagcttccaaacggaaaatatgatatgaaaaaactggaggaaatgtaaaatgagagacacaattttagagattttagaggaattaagaccggatgtggattttgagaaggagacaaagctcatcgatgacaaaattcttgagtcatttgatatagtttcactcgtatcggagttgacagatgagtttgacatcacaatcaggccaaaggatctggttcctgagaatttcaactcagttgatgcaatcgagaagcttgtgaaagagcttgtggaggaataaagcatatgagacagacaccgtactatgtatttgatacggacgagtttgcgaagagagcagccatgataagggctgctcttgattgtaaaggaggacgtaggataccactttgtttttcgataaaggcaaatccgtttctgcttcacaggctgccggcgggcttagaccatgtggaggtgtgcagcccgggagagcttgagatatgtatagcacttggcgtgaagccggagagcatcatctattcaggcgtgatgaaggaaaaatgcgatatagagcgagccgtttcgtatggcgccggcatactgacctgtgaaagcataagacatgcgacgcttatatcagaggtgatgcttgaatgtatgtctgaaggcgcgcaggaagccgagtttgccgaaacgaaagcacatgtcatactgcgcctgacaagtggcaaccagtttggcatgtcgcttgaggatattgaatacatcatatcgaatccggatgagtttaagggcatcacggtaataggcattcactactattccggcacacagaagagtcttcgcaaaataaataaggacttggaaaaaataaagtctgcacttaccatgttaaaggacaaatatggctttgagccacagcttgtagagtatggtccggggctttgcgtggagtattttgaggaagactggcaggaaaaggaaaaacaatcacttgatgaggcagcagaggtgcttagagaatttgccgaggaatatccgcttggcattgagatgggacgcttcctagcagcctcatgcggtaaatattacacacaggtaaaggatcttaaatcgacaggcgatgccaattatgcgattctggatggaggaatccaccatctgaattacttcgggcagaggatggctatgcaggtgccaccgattagtatatatagagctgccggtgtggaattaacacaattgccgggcacagactatacactatgcggaagcctctgtacagtggcagatgtgctagtacgcgaggtgaggcttaagaagcttaagcttggcgatgttcttgagttcgggcactgtggtgcatactcggtgacagaagcaccggcgctctttctgtcaagacagcttccggctatatatgcgtattcgaaggagtatggatatgagtgtcttagggagcatattcctgcggctgagataaatctggccggaaaaaaataatgtaaataaaaccgcccgtggcaaaattgctatgggcggttttgtgtgacataaacaaagcattttgtggagagcctgattattagccaagctccttctcacacatatcaagtacagaagcaatggtagtatccatatcatagtacttgtactcgccgagacggccaccgaatataacaccggtctccttatcggcaagctccttgtacttggcgtagagctgtccgtttttctcatcgtttacagggtagtaaggctcatcgcctgccttccactcagaagagtactcgcggctgatgatagtctttggcagatcattgccatcctcgtccttgccgaactcgaaccacttgtgctcgatgatacgtgtccatggagtctcgcggtcagtatagttgacagcagcattaccctgaaagttaggaatatcaagggtttcattctcaaagcgcactgagcggtattccaaagtacctagcttaaagccaaagtatgcgtcaatcggacctgtgtatacaaccttgtcagcaagagcatcaagctcagccttgtgctcaaggtagtcagtatttaatctgacctcaatgccgtcgagcagattttcaaccatctttgtgtatccaccgattggaataccctggtaaagagcgttgaaataattgttgtcaaaggtaagtctcacaggaagacgcttgatgatgaaagccggaagctccttacagtcacggccccactgcttttcagtgtagccctttacgagcttctcatagatatcacggccaacgagtgagatagcctgttcctcgagattttttggctcgccggtgatttcctttttctgctcctcaatcttggcagcagcctcgtcaggtgtcaccacaccccacatcttgttgaaggtgtacatattgaaaggcattgagtacagctcccccttgtagttggctacagggctgtttgtgaagcgattgaactcagcaaactgtgtgatgtagttccagaccctcttatcattggtgtggaatatgtgggctccgtacatgtgtacattgatgccctcctgcttctcggtgtaaacatttcctgctatgttaggacgcttgtccacaacaagcactgatttgcccttggcctttgcctcatgggcgaagatggctccgtagagaccggaacctactattaaataatcgtatttcattgtattctccttgttacatagtgataatataaattataagtacattttccagaaaaacaagcataaatagtgaaaataagtaaatattaataaatcctgtattagaaaattatgatatacttagatataggaagttcaaaagtaagaaaatgagaggaaaagcaatgatgaaactacccggctactactcctcaggagaatttgcccacaagactcatattacaaagaagacactgcgatattatgatgagcataatattttcaaaccgtcctatgtcactgataagggagccaggttctataatgataatgattttgcaaagttgcaacagattcagttttttaagtatcttggattttcactggatgatataaaggaaatgactctgcgtgaggtagacagcaagacaatacttgactcttttcatatgcagctggggcttattgaggagcgtatggagcagctggaactgatgaagtcagctcttaaggatgcttctgatatcatagagcgtggagcggacgctgattggagccatatgcttgacctggtcaatatgaatgagatggagcagaagcttaagaaacagtacaaggatgcgtcaaatatttctgcgcgtattaatcttcacagggattattctctaaaccctgtaagctggtttgagtggattttcaatcaatgtgtatttgaatcgggctatagtgtgctggaactgggatgcggagatgcatctctatggtcacgtaatgctgagcgtataccggcaaatatggatatattgctgacggatatatcatatggcatgataagagatgccgccagaaatttatcggataatggcagtcagttcagatatgaggtaatggatgctcatcacatatataagctggatgacagctttgaccgtattatagctaatcatgtgctgttttactgcgataatctggatatggtgtgcagtgaggtatatcgtgtgctcaggccgggaggcatctttatatgcagtacatatggttctgatcacatgaaggaaataagctcgttggtgaaagagtttgatgataggattgagctttctgctgacaagctatatgatcattttggaaaagaaaatgggaaaaagcagctgcaagagtatttttctgatgttagctgggtacagtatgatgattcgctttatgtgacggattatgaaccggttgtggagtatgtgctttcatgccatggaaatcagaatcgtcttattgtggacagatataaggagtttgttgcatttgtaaaggaaaagactgataaaggattaaaaataactaaagatgcaggtgtttttattgcaaggaaataattgttttggacaaaatacataaaatttaaaataatacttgaaggtgcccttggggcaccttttataatgcaggtaaatgatgaatcaggtcagtggattctacagaccgaaagcatcaagtgtagcacgtagtttcagtttgaaggagaacaacatgaaaggtattatattagcgggaggttcaggcacacgtctttacccactcacaatggtaacatcaaagcagttacttccaatttatgacaagccaatgatctactatcccatgtcagtgcttatgaatgccggcatcagagatatcctgatcatttcaacaccacaggatacaccaagattcaaggagctcttaggagacggacatcagtttggtgtcaacctcacctacgaggtacagccaagcccggacggacttgcacaggcatttgttatcggtgaggaattcatcggtgatgacacagtagccatggttctcggagacaatatcttcgcaggacacggactcaacaagagactcagggcagccgttgaaaatgcagagagcggtaagggagccacagtattcggctactatgtagatgaccctgagagattcggtatcgtagagttcgataaagagggaaaggctatttcaatcgaggaaaagccggagcatccaaagagcaattactgtgtcacaggtctttacttttacgacaacaacgtagtagagtacgcaaagaaccttaagccatcagccagagacgagcttgagataacagaccttaacagaatatatcttgagaaaaaggcactcaatgtagagcttttaggacagggcttcacatggcttgatacaggaacacatgagagtcttgtagatgccacaaactttgtcaagacagttgagacacatcagcaccgtaagattgcatgtcttgaggaaatcgcttacttaaacggctggattacaaaggatgatgtattaaagacatatgagctcgtaaagaagaaccagtacggacagtacttaaaggacgtacttgatggaaaataccgcgagcagttatattaaggaggaaattaaaatgacaattatcgtaacaggtggagcaggatttatcggaagtaacttcgtatttcacatgcttaacaaatatccggattatcgtatcgtatgcttagactgtctcacatatgcaggaaatctctcaacacttgagcctgtaatggacaatccaaacttccgtttcgtaaaggagagcattacagaccgtgacgctgtatacagattatttgaggaagagcatcctgatatggttgtaaacttcgcagcggagtcacacgttgaccgttcaatcgagaacccacaggtattccttgatacaaatatcatcggaacatcagtgcttatggacgcatgccgcaagtatggtattaaaagatatcaccaggtatcaacagatgaggtatacggagatctgccacttgaccgccctgaccttttcttccatgaggatacaccaatccatacatcaagcccatattcatcatcaaaggcagcagcagacttacttgtgcttgcttaccaccgcacttatggacttcctgtaacaatcagccgttgctcaaacaactacggaccataccatttcccggagaagcttatcccacttatgattgcaaatgcacttaatgataagccactcccggtatacggaacaggcgagaacgtgcgtgactggctctatgtagaggatcactgcaaggcaatcgaccttatcatccacaacggacgtgtaggagaggtttacaacgtaggtggacacaatgagaagacaaaccttgaaatcgtaaagattatctgcaaggagctcaataagccggagagccttatcacattcgtaggagaccgtaagggccatgatatgcgttacgcaatcgaccctacaaagattcacaacgagctcggatggctcccggagaccaagttcgaggacggaatcaagaagacaatcaaatggtaccttgacaaccgtgagtggtgggagacaatcatcagcggagagtaccagaactattacgagaagatgtacgcgaatagataactgctattcgtaaaccttgaagaatcgaaatgcgtgttgtaagctcgcttacataagcgcattttgattctttgaggctctagaatagagcaggaacaacgtatataagcaatcttagctgcgtaagcagcgggaaagcatgcctaaagcatgcgggattgcgcatatatgttgggcctgtttacgaatatttgtaaaaaggagacccaaaatgaaagtatttgttacaggagttgcaggtcagctcggacacgacgtaatgaacgaccttgcagcgcgcggttacgaaggaatcggaacagatatagcaccacagtatagcggagcagacgatggtacagcagttacaactatgccatatgtctcactcgatataacagaccgtgatgcagtggaaaaaacaatcacagagcttaatcctgatgtggtagtgcactgtgcagcatggacagcggtagatctggccgaggatgatgataaaaaagcaaaggtgcatgcaatcaacgcagacggcactcagaatattgcagatgcctgcaagaagatagatgccaagatggtatatatcagcacagattatgtatttgacggacagggcaccacaccatggcagcctgactgcaaggactatgcaccactcaatgtatatggacagacaaagcttgacggagagcttgcagtggcaaatacacttgagaagtactttatagtgcgtatagcatgggtatttggagtgaacggcaagaacttcatcaagacaatgctaaatgtcggcaagacacatgacaagctctcagtagtaagcgaccagattggtacaccgacatatacactcgacctttcaagacttctcgtagatatgatagagactgataaatacggtcactatcacgctacaaacgagggcggatatataagctggtatgattttacaaaggaaatctttaagcaggcagtggagcttggacatacagagtattctgaggacagacttacagtaacacctgttacaacagctgagtatggtgtgtcaaaggcagcacgtccgtttaacagcagactggacaagagcaagctcgtggagaatggatttaagcctctccctacatggcaggatgcgctgcacagatatctgcaggagatagacttttagaaaggacatagaatcatgggacagattaaagtacagaaaaacgtaggcggaatcgaaggactttgcatcatcgagcctacagtgcacggagacaaccgtggatactttatggagacatacaattcaaaggatatgcaggaagcaggcattgacagagtattcgtacaggataatcagtcatgctccacaaagggagtgctccgcggactccatttccagaaggaatacccacaggcaaagcttgtgcgtgcagtaaagggctcagtatttgatgtggctgtagacttaagaagcgattcaaagacatacggcaagtggttcggagtagagctcacagaggagaacaagaagcagttccttatcccggagggctttgcacacggatttttagtactctcagatgtagcagagttctgctacaaggtaacagatttttggcaccttggagatgagagcggccttgcatggaatgatcctgcaatcggcatcgagtggccacagcttgtcggagagtatcctggaagcgctgacggaagcggatacacacttgaggatggcacaccaatcaacttgagtgataaggatcagaagtgggagacactggagaatacatttaagttctagaataaataaaacttgcaataagctatggatggtttatactattcatagcttgttttattttaatacttatgggaagtgtaacataatatgaaatttacatgtcttttaccaatatatttattttagcaaaagaaatactgttaaatgtatggaatctgacaatagtggctgatgtcaatatgcaataatcaatagcaaataaaataatgatatggtaaaatagtaaaaaatagtaataaaatgtaaaacaaattaactattaattttatcttaataaaattgtaatatcttgaaaaaagcagataatgcgtttataattttacagaatattttgtgaacgctggagtatatttatataatgtttaattctatctttaaggattcaaggaaaatacaacttgattggtgggaagtatcgtatttagttatatttgcaataatattaatatttacaatgtggggaacaacaatgttacccgatttttggccatcacggtttggattgtttacgtattttcttattatggtatatgtcatagtaaagggaataaagaagttcacttacacaaaaacagagacggtttttgctttgattattggaacgtcatttttaatatgtgcttttaaaaatgatatgtattcatttttgtttatgttagcattcttaatagttggagcgaaggatgtatctgttgataagatttttaaagtatatttgcttatagacggtcttattatgttaattgcatttgtatgtagtcaatcaggtattattgagaatttgcaatactggaaaaacgaacagatgaggtttgcgttaggctctgtgtatccaacagattttgctgcacatatattttatatagtattggtcgcaatatgtttatataataggaaagtttatattgtagaaccttttctgataatgataattgctttttttgtatataaatggacaattgcatcaactagccttatctgcatggttgttttttctgtgtttatattaggatatataatatggaaaataaaaaaagaaaaaataaaagataatatatttataaaattgcttagtgctctaccaattgtgtttgcgtcaatatatatatttatgacagttgcatatgataataataatgcaaaatggttatggattaatgaaaaactgagtgacagacttgaaaattcaaaaaagggattcgaaataaatgggtttaatctgtttggaaaatatattgaggaaaaaggatgggggaaaagtgtagttgaaagaccggattatttttttcttgatgattcctatatacgaatactattagaatatggtattataatatttgtggttgtaatggcaatattaattattgtgtcacgaagagctgcttacgctggacgtatgactatggtttttgccattgcatttatttcattacattcatttatggaacaccatttattagatatagcgtataatccgtttattttatgtgtgtttgccgatttgagtataaataaggagaaaaaagaatgcatgattctaaacaaacgttagtgagatatattgcaattattacagacctgttaacaatgtttgcagtttatctggtagcaaattatataaagttcggtaatttcagaacagggctaaataatccgcaagattattatttaggagtgtttacaacatctttgatattttatataatagtctattttttcattccttcacgtgaatcaatgatatatcgtaactggattcaggaagtgtttgatgtggtgaaaatggaaatatatataattgctcttactgttggatatttttttattacacagacaagctggtattattcacgagttcagatggctatatattttggtggaagtatagtatgtgttattataacaagacagattttgaaacgatttattttgaaatcgtatcatcgttcgggatctaacgaaaaaattatgcttgttacaacttatgatcaagtttctgatgttatgaataagattaaacaaactcgtaactggtattttagaatttcgaatttagctattgtagacaaaaatgttgttggtgaagaattagaaggtcttgaggtagtagcaaactgtgataatctgatacagattgcttctacatctgaaattgatacggtattttttcatgtagatgatgaagtgcctcttgattataagggattgattagtcagatacgctctatgggaaaaaatgtgcgtgtcagattaaaagagtatagttatgctcatggtaatagagaattggaatttcttgggaattttgctgtggcaacattttcgtcaagacattatagaatcaggtatgttgcgattaagagaatatttgacatagtttgtgctattgtgggaatgatgatttttattccaatgtattttattatggcaataggtttatttatagaaggagatcccggtagtgttattgttcagacacttcgagtgggcaaaaatggtcgaagattctatatgctgagattcagaaccttgagaaaaaaaggcattgaagccggtgctgggaatggtataccacaatatacaattatgggcagatttattaaagcattgggtatggaaaatttgcctaatgcgtggaacatcctttgggataatatgtctgttgtaggtgttaatgccccaactttgccggagtttttggagtattcgcacaaaaatagaaatgtaatgagcatgaaaccgggaatgataggattatggcaggttcagagaaaacattttacaaaggagcaatctgatgaaaattatgtggataattggtcactttttatggatttaggaattattgtcaaatctttaaaattattttttactaaataaagcgaggtaattatgaattattggataattgcaacaatagtaatttgcttatttatatggtatattgttaaatgctggtcaaaaagttttgaaatagtaaatgaaggggcactcgctcaggaaagagaagcaatacttgaaataatagaacaggaaagaccgttggagtatgctcatatttcaaatattgattacaggcagaaaaagaaacatatatatcattttataaaaagattgacagatatagctggttcattggtgggaattattctgctttcaccaatatttttgcttttatcatttttggtcaaaagagaagatggcgggaacattttctatggacatatccgtgttggatatcatggaaagaagattaaggtttataagtttagaagcatgaagatgaatgttaaaaatcttgaaaaacttcttacaccagagcagctagagcagtatagaacagaatttaaaatagataatgatcctagaataacaaagattggtaatgtgcttagaaaacttagcctggacgaattgccgcagttatttaatattttaaaaggtgatatttctatagttggaccgagacctatagtggaaaaggaaacacagatatatggggatgatgtggaaaagcttcttagtgtaaagccaggattgacggggtattggcaggcttatgccagaaataacgccacatacgaaagcggtgaacgtcaaaaaatggagatgtattatgttgaacataatagtctttggcttgatataaaaattttatttaagacagttatttcggtaataaagaaagaaggagcacagtaagaatggatataaaaataattgtggctacacataaaaaatattggatgccatcagatgatatatacttaccggttcatgttgggaaaaaaggaaaaacagatttaggttatcagggtgatgatacaggagataatatctcagataaaaatactaattactgtgaattgacgggattatattgggcatggaagaatttgaaagcagattataaaggattagctcattatagacggcattttatggttaagggttctaagggaaccaaggaagagaaagttcttaatcgtcaacaattggaagaattacttaaaaagacagatattattttgccaaacccgagaaattattttattgaaacaaattatagtcagtatgtacatgcacatcatgcacaggatttggatgttacaagacaaattttggatgaaaagtatcctgattatgtaaaggcatttgatgagactatgaaaagtaccattggtcacaggtttaatatgtttatcatgaaatcagaactttttgacagctattgtgagtggatgtttgatatattgtttgaattagaaaaaagacttgatatatccgattatagtgcttatgatgccagggttttcgggtttgtaagtgaaagacttcttgatatatggattaaaacaaataagttgacgtatattaatataccggttgaatttatggaaaaacagaactggttagtaaagggaactaaatttcttgagagaaagataggtatacacggatgaaacctttaataagtgttattttgccaatatataatgttgcacaatttttgccaagatgtatagagtctgtttgtagtcagacttatgacaatttggagataattcttgtagatgatggttctcctgatgactgtggcgacatctgtgataaatatgcagaaaaagataatcgaattgtagtagttcataaacaaaattgcggcttgtctgatgccagaaataagggggcagagatagcaaatggtgaatatattacatttatcgattcagatgattatgttacagatacatatgtagagtatctgtattcattgattgagaaataccatactcgcatgtcactatgtacacatacagtagtatttgaaaatggcaaaaatatcgtatatggaaatggtggagatgaagaactttcgacagagcgatgcctagagaggatgctgtatgatgatgttatcaatacatcagcttgggctaaattatatgagactgagatggtcagaaaatttccttatccagtaggaaaattgttcgaggatatagctacaacatataagttttttatggagtgtgatagaattgcatgtggatataaaagtcagtatttttatatgctaagaagctcgtcaattgtttatcaagaatttaatatgaaaaagttagagcttcttgaaatgacggatatcatggcaaaggatgtattaaaggaatatcctcagcttaagattgcggtgcaaagacgacaactttatgccaggtttagtacgcttaatcaattccaaaatgtaaaagggcataagaatgaaaaaaaagaactgatatcatatattaggatgaataaaggttgtgtattaggaaatccaaaagcacctaagagagacaaatttgcagttatggctcttggtatggggtatccagtgtataggttatgttggaagttagcaggaaaatagatagcaggaaataaatatgaaaaaaatattaattggatatcttatagatgggaagaatagtgggatagataattatatcctcaatattattgatcagattaaaaatgataatgttaaaatagattgtttaactaatcatatagataatgaattgaaaagcagattagataaattaggagttggacttttggaaataccgactttaaagcacccttatagccattattgtgccatgaaagccattattcgaaaaggaaagtatgatattgcatatttcaatatatcagaggcctttaatagtcttggtttgctggctgcacatagatgtgatgttaagaaaattgttgtacacagtcatagctcaggggtgaattcacattcaaagacggtaagatatattaaaacattttgtcacacaataatgaagcatttgatagtgggaagatgtgcaaccgacttctatacatgttcatatgttgcaggagaatggatgtttcccaagaatgtactttctagtcagaagttccatattatgaataatgcggttaaggttgaacgatttaaattcagcgaagaaattagacacaaaaaacgtgttgagttagatcttgaaaatcgtattataattggacaggttggagcattttcctatcagaaaaattcagaattcgtagttgatatagcagaggcattgcataggaagaatcccaaaactatggtactgatgataggtacaggtagtgattttgatgaaataaataaaagggttaaagaaagaaagctagagaatgctgtacgattgatgggatcaagaaaagatgtaaatgaattaatgcaggctatggatatttttattctgccttctaggttcgagggacttcctattgtagcaattgaagcacaggtatccggactaaaggttataattagtgataggatttctaaagaaactgcattgagtgaaaggtgcaagtttttatcaatatctgaatcggctgataagtgggcagaggcaatattgagtaatatttattatgacagagattcgcttaatttgtcagaatgtaaatattgttttgatgttgttcaacaaaacaatgcaataaaagaaatttttaatttttaaaatgtatttatgcataaagatgcgaaggagaaattgattaatgaagagatgtgatactgtaatggaaaatataataacgtggtttaaatacttatatatttttcatataatttgtgcaggaaatagtttattatttgatacacctttattaaaagtcacttcagtattagttttgattttgggagttgtagcggttttttggagaattttacaaataaaaagatatatacaatatccatttataaaaatgtatataatttttttggcactgtttataattacgtgtattattaatttcaaatatggtgtgacaaacaatatgaaaataataatatggatgacatttcaatttgtgctattgtatttatttgatttgaaaagagataaaaaatttgtaacaaaagaatttaggtttgttatattggaaatcctgattataacatctattatgaatataataggtataggaatgctttttgcaaactatggctttaatcgcattataagtgaatcaaaaacatttattgttggtgtagcttattggggaaggttgtatgggattcataccgatcctaattatggagccatattaacgacaatagcattgattataagcttgtattttttctttagtagtcaaaaaaagtgtataaaagttagtatggttgtctcaatgcttattcagttaatgagtattagcttttctgcttcaagaactggaatgatttgtgttattataagtatgcttttgttcttcttcctgtatacttttaataaaagaaaaaaaattacgacagctattgtagttgccattattgctgttgctgttgcaatgggggcacaacaggggattaaggctggatataatggttatgtggcagctgtggagagctggaatcatgcacatgggtctgataacgacaaggaagataataaaaataaaatagaaattggaagacaagaggaattggagggagatgtaagcaacagaagatttgatctttggaataatgcatttgaactttttaaaacaagtccaatctttggaataagttttggaaataatgttacgtatgcaggagaaaaacttccaaattgctacatgttaaccaatggatttgccgtttttgacgcgtttcataatatgtttatggacctgttatcttctcagggaattgtaggaacaataatgtttttacttattatgatatcatcattgatttatattctaaaaaattataagtttattaaagatgaagatatcctgaagtgcattgcactgtttagtggatgtattacaattgttgcatcaagtatgtttgtatcggaaatattatatgttaataatgaaactacggttgtattttggacgttatggggatttttaatatattttatttataaaaataaagaatcaggtgaagtaaatgggattagtgaagagaattaaatatactatttcagcaattaagttgattccgtataaaatcctgtatggaaatagattgaacactggaaaacaaattaatcttggttctaaaacaaaaattgtcgtgactaaatgtggaaaaattgagatagcaaatgattttgaaagcaaaagattttgttatctaagtgtacaaagcggttgcatgataataggacagcattgttttatgaatcagaatgtaagtgtgacgtgcttgaaacaaattgagattggagtaaattgtattattgcgaacaatgtagtaatggttgatcatgatcatgatactgtcaatggtggatttgtttctgcaccaatcaagataggtgataatgtgtggattggtgcaaattctgtaatattaaaaggtgtaactatcggtaataatgcaattattgctgctggcagtatagtaactaaggatgttcctgctaatgcaattgttggaggttgtcctgcaaaagtaatcagatataaagagggatgaatataatgaaattgtccataattgtacctgtgtataacagagagaattatatagaatcatgtttaaaaactttacttcagattcagagtgatgaaattgaaattataattgttgacgatggatctatagataatagtctggatttgtgtcgtggctatgaaaaaatagacaaaaggataaatgtataccataaggaaaatggtggagtgagttcggcacgtaattatggaattaatcatgcatcaggcgaatatttgatgtttgtagatagtgatgatatgatatgcgtagagactatttcagattttatgaaaaagaaatgggataaagatatatatttatttgattattatacggataatggtgagttaagttattgtaaacgtgatttaccgaaggagcaggaaaatgaaaatttcctgctccatgcatttttaatgttgaaaaacaatatgatttggaataatatttataaaacatctgtagtgaaaacaaataatattttatataaagaaagtataaaaatgggtgaggatttgttatttaatcttgaatatgccaattatgcaagtaattacgagtatataacgcaaccattgtacaagtataatgttgaaacagttggtagtgctttaaaattgacaagattgtcatatattcatgattatacacagatttatgattatttgttaacgtattattcggaaaagaaattcgaaaagtataaagatgttgtgtactttatgaatggcatatttatgaatcttgcaggagctgattatgatttaaaacatccgtttatagaggaatttgagaaaagtcaattatatacagatatttcaaaagaatctttgacaagtaaaaagcttaagcttaaacaatggtttatagtaagacatatatatcgaaataggcttatgaaagaatttgtaaaaaaattatttatttaaaatcagaagggcggccggtatgaatgcaaaaaaaggaatttataatatagtatttggtattttaggacaagctttaactgttgtatttgcaattattgttcctaaggttattattgaatattatggttcagaggtgaatggacttttatcttcaatttctcagatattggtatatcttggattattcgaagctggagtaggtaccgcatcgttacaggcattatatcaaccgatagctgaaggtgggaaaaaagatataaattctattttatcagcaactaataaatattataaaagaactagtaagctttattttgcagcgttggttgttttttctgtaatatatccatttgtagtaaaaaatagtcttaatacgtttttggttatggcattaattttctttggaggattaggaaatgttgtcaactttatgtatcagggaaaatataaaatattacttcaggctgaagggaaatcctacattgttactaatattacaacaattgttaatgtgttgataaatgttggaaaaataatacttattattgccggatttcaggtccttgcagttcaggttgtattttttgcatttaatgtattgcaaatggctttgttcgaaatatatattcataaaaattatggctggatagatcttagtgttgaaccgaatgaagcggcaatttcacaaaaaaattctgtattaattcatcaaatttcaactttggttttttcaaacacagatgtattggtattatctgttttttcaggattaaaggttgtaagtgtatataccgtctataattatatatattctacagtacttaatttgtttaatacagtaaacaatggtctggttttttatttgggacagaattatcataagggaaaggaacattttattcacatatatagagtgtttgaactggatattacggtctttgggtattatgtatttacagtgattggagtattaacacttccattcatgaatctgtacactaagaatatgacagattataattatatagataagcttttgcctgttttatttttgactatccagttacttagcattgctcgttttgcatctaataatttgattaatatagctggacattttaaaaagacacagtcacgttcaattgcagaatcagcaataaatcttatagtatcatttttagcagtatataaatttggaatttatggtgttttgataggaactattgttgctatggtttatcgtactaatgatatgattatatatgcaaatcatagaatattacaaacttcggtgatttccagttataggataatgatagttaacatattaacagctgttttgtgcatgattttattttatgataaaattcattgggctggaagctatatgctattaataggtgctggaattgtctatggaataattattttaggaatttttttagcggtaaatttgatttgcaattggaatcttatgaaaaccaattttagtatggttaagcagctgataaagagaaaaattgcttgctgattcattgtaggttataaaagagagaggacaaaaatataatgtcaaaaaaaagagttggttattttgatgcattaaatgtagtgtcatgcattgctgttgttacaatgcatgtgaatggtacttcattatatacatttcatcatagcgttagctggttgagtagtctgtttatagactgtttatgttattttgcggttcctgtgttttttatgttaacaggggcaacacttatggattatcgtaaaagatataatacatatgaatttataaaaaaacgtttcagtaggactatgattccgtttctattttggagtgtggttgctattgtatggtgtgttctggcattaaaatgtttgaaatggtctggtgtatcaagtccaattaaacttataaatgttatatttaatgttagagcgtttaatatatattacttttttatagatttatttgcagtatatttgtgtatcccagttttgggaataattccatcacaaaaaagaattggtaaaaaaggagtttttacatatttgattctttatacgttcttgagcagatctttattaccagtgctgttttcgataattggaattgattggaatcaaagtttaaataatccattgggtgggggatatattattttcgtattgctgggatattatcttgcaaacacacagatggaattaaaagtgcggagagtaatatatttatttggtgttatagcgttgttttttcaatttggaattacggcatatttgtcgtttagagataattcaattaatgcaacgtatagagggtatactaattttcccacagtgatatatgcggtggctatttttacggcattcaaatattttaaatgggagaattatgaaaaatttaattctacaattatgcaattatcgggggcgagttttggagtatatttgatacataaataccctatatatgtgctatgctatatttttagtattaatgagttttctactgcttggagaataggtggtatatttttgacatacggattatctgtaattatagttaaattattacaaaagataccatatgtgaacaaacttataccatagtgaaatgttaagaaaatattaagaaaataatttacattttatataaaatcaagtataattatagagcattttgtgggcagaatgctctttttagtgtacaaaattatgggaagaatgagaggtatatatataatggatataacaagagagaaaactatgaggatagtaaattatatatttgctgtattaataatattgtgtatagctgtaatgttgctaccagcaaattattcggtagaatatagcttgtatggcaaagatatggataagcatactctgacagaagtggagtattcatcagattcggatttagaaagacataaggcagataagaataatacgactgtaaaggttccatacgttgctggcgaaacttttgatgagatgaatatatatacagacactaaaaatattaaaatggctattaaatggaatgggataactgtaaagaaattttcaaatgatattattttgaataattgtacagtgaaatatgatttgattgatgatgaacttcctgactattccattgaagaattacttgaaaaatattgtgataaacagtatttgatattgatggcagtatgcacagattattctttaggaattacagattcaattcagcagtgcttaaatgatattggaatagatagtactcctagagatacaggaattgcatcaagcttctatgctgttatcagtgatggaaagctcgttaaaacggaatcaagcaatgaagcagcactttattttaagaaaaaaattcatggtcacaatataaatttatgtagtggagggcaatatcttggaaattgggcagatattaaaattgatggtgagagttattgtacacacagacaggggttgaatatagttgtgtatgatttggaaaaggattgtttggttgatagtatagggtatcagaattatcaagaggcatcagtttttaggaatacggaatatttacaaaagccgattgaacttatagcaggaaaatcagcatttgatacaataaatgcaaatataaatatcataaatttcctgcaattggttatcccatgttttatagctcttattcttacttttatatggaatatgataagaatagtggaaaagtcaaagagaaccaatcaaacgataaatatagtatggtttgtaatacatcagatagtaatggcgattctgctcatgctggcgagtggtttagtatggggatataaatatctttcaaatcaatttgaagatgtatcaatatcgcaactgctgtttcatatgactacggatttagggggaactaattggtcagattttagaaacttatttattgagattggtagttcaataatttttgctatagtatttgttgtactattgtcgatatttatcaggaagcaaaaatggggctataggtttttggcgagcagtttgataatagttataataagttttggtacaataggtaatgtatttgctaaatttaataaaaattatggattatataattatgcagttgcttcacagacaaagacaaatctttatgatgtttattatgtggacccttcaaagactaaaataacatttcctgaacataaaaagaatcttatttatatctttttggaatctatggaaatatctgattcagatacagaaaatggtggtggaaaagatactgactatatttctgaacttacagatttggctttaaacaatgaatgctttaatggaacagatacacatttgaatggagcgtatccgcttggaaataccacgtggactgctgcaggacttgtagctcagacttccggggtaccactcaacgcagatgtaaacgcatatggttcggatgatgaagaatttcttccgggagttttttcaacaggacagatccttgaacagaatgggtacaataattgcttactgattggctcagacaagtcatttgcaaatcgtggaaagtactttgaagagcacggtgattttaaagtgtatgattacaattgggcaataaagactcataagataccatcggattattttgaatggtgggggtatgaggacgagaaactatttgattttgctaaggacacactcacggaactagcttcaaaaggtgagccgtttaatttgactatgttaacaacagatactcattttacggacggctatgtatgtgatttatgtgagaatcagtatggtcagcaatattcaaatgtgctggcgtgcaatagtcgtcaggttgcttcttttgtagaatggatacagcagcaggatttttatgaggatacagtaattatactatcaggagatcatttatgtatggatagcagttattttaaggatatgcctgatggatacgataggcgtacatatgtaaatgttataaattcagataagaaatacactggagatgcaagaacgtatacaactatggatatgtttccaactacattatctgcgttgggatgcggtattgaaggggatagattaggtttaggaacagatttgttttcaaatactaaaacattagcagaagaatttgggtgttctgcacttgattatcaattgaaattaaactctaaattctataataaaaatattttgaattaggcaattgcgttaaatggtaaatatagcacttgaaaagtatatataatagtaataaaataaatctatagtactaaggaaggtggcttaataaatgttaaaaaaggcatgtaaaaaaatatttgccgcaatattaataatggcaatgatttgcggtattttccctaatttgggagattcgcaggaacaggtgaaggcatcatcaattccaaaatatgttgtggtattggatgctggtcacgatgcttctcacgcaggagctcaaaacagaagtaatggatacagagaggaagtccttacatataagattgcctcatattgcaagcaggaattagagaagcatgatggtgtaaaggtatatatggtaagagattcctactcgtgtccctttggaggcggctcagtaaagagcacagaatgtaattctaagcgagtagagttttcgaaaaatgttaaggctgatttgtatattagtttccatttgaattcttcaggaccatcggcaagaggcgtgtcagtatactacccaaatatgaattataaaagtgaaataggaagaaatggagaagttcttgccaaagatattataaaaagattaaaggccttgggtattcctcagcaaggaagaggaacacttataagaaattcggaaaataatacaagatatccggatggatcattagctgattatttggctgtaataaaaggaaataaatataacaatattccggcagtactgattgaacattgctttataagtaatgcaagtgattgtgagcaatttttgtcatcggaagaaaaactgaggacacttggagtagcagatgcaaacggcataatggactatttaggtcttaataatttgaaacaggcatctgatggcaattggtatttttataaaaatggatctgttgattatagctataccggtttggcattatattcaggaaattggtggtatgtaaaaaacggtaaaattgactttaatgcaaatacattagcttattttaaaggaaattggtggtatgtaagaaatggacgtgcggattttaatgccactacactagcatattacaataaaatttggtggtatgtaaaagatggacaggtagattttaatgcaaacacgttagcatattataataataactggtggtatgtgagaaatggacaggtagactttaatgcaaacacgttagcatattataataataagtggtggtatgtgagaaatggacaggtagactttaatgcaaatacattaggatattataataataagtggtggtatgtgagaaatggagctgttgatttttcgttcgatggaattgccagatatggttccggtgattggtatgtacataatggagtagtagattttaattataatggactatatagggttagtaatttaacacagagcatgtcagatggtcagacagtgacatttgatggttggtattcatttgttaatggtaaagtagataaacattattcagattttatttatgatggaaaagagtggaaaccggtaacgaatgaaaatgtaagcagtacatataatggttttgccgagaatggggaaaataattggtttgtaattaatggaaatgtaaaatctgattttacgggtctggttacggacaaagataatattacaagatatgttgaaaacggaaaagcttcaaatattacaggagttaaggaactttcatgccaggaatataatcttacaacaggtaatactcaggaagttaatggaacatatcactttactaatggctgtctggatagaacatataccggcatagttgaagaaaaaaacatattaacctactgggaaaatggtcagttaaataaagatattaataaattagtaaaatataaaaatgaattgtattattttgaaaatggaaaatgcgacaagacgttcaaaggagtagtgcaagacgatacaggcagttggtatataaataatggaaaagttgattatagtttttcaggaatggcgttgtgtaataagaacaaatggtggtattgcattaaaaatggtaaattggattcaagcgtaaatagacttgaatacatgtatggaagatggtggtatgtacataatggagtgattgatttccaagagaatacacttgtacaaaacaataagggctggtggtatgtaaataatggaatggtagatttttcatttaatggaatttcaaaaactgatcatggagaatggtatataaagaatggaaatgtagattttaattattccggaatggcattatgtactagtgatcaaaattataatggtaagacatattttcacaaagactggtggtattgtattaaaaatggcagctttgatgcacgtgcagatagacttgaatacctatatggaagatggtggtacgtacataatggagtaattgatttccaggagaatacattagtgcagaataacatgggctggtggtatgtaaataatggaatggtagattttaattataatggaaattttaaatacaaaaattggacatatgctataaaaaatggacatgttgagttttaatatttaagcgttgtttatggaggatgtttttatggttaaaaagataaatgcatttaatattcaaaaagtatttgttgcatttgcgttgatagcatttacattatttttcgttgggagaaatgatgtatctgcatcgacaacatcaaattactacgtaagtgacccgaactctgctatgtatggaaaagttctgaaactatactatgataatcaggggaatataatagaggatacgctaggaatagcaggtgatttctctgaatatgaaatatatgtaaataagagtaaagaccttattactgtatatggtagggataacaatgtatatgttcctgtaaagagatttatctgctcagatggtgggaataatacacctgaaggcatattttatacacctgcaaaatatagatggcagactttaatgggaccatcatatggccaatggtgtacaagaatacatggtggtgtattatttcattcagtattttataattcaaaaaataacccacagacattaagtgtgagtgcatacaataaattgggtgcaacctgttcacatggatgtattcgtcttacagcaggggatgcaaaatggatatatgataattgtaagataggaactaaggtagttatatactcaaagggcggatacgagccgttttcgaagccttcctcatataaattaccattatggcatacatgggatcctacagatccgacatcgtattatttatgtcaacagcgtggttgtcactcgatcattgcagatggtttggcatatgatgcaacagataaccagtggagatattatcagagtggagtttttgcggactggtttacttcattggcacagtataatggtcaatggtggtatgtgaaaaatggtgtgattgattttaatgccaatacattagcatattataacaataattggtggtatgtgagaaatggccgagtggactttaatgcgaatacattaggttattataataataactggtggtacgtaagaaatggtcgagtagattttagtgccaatacattaggctattataataacagctggtggtatgtaagaaatggctgtgtagattttaatgccaatacgttaggttattataataataactggtggtacgtaagaannnnnnnnnnnnnnnnnnnnnnnnnnnnnnnnnnnnnnnnnnnnnnnnnnnnnnnnnnnnnnnnnnnnnnnnnnnnnnnnnnnnnnnnnnnnnnnnnnnnccaatacgttaggttattataataataactggtggtacgtaagaaatggtcgagtggattttaatgccaatacgttaggttattataataataactggtggtacgtaagaaatggtcgagtagattttaatgccaatacattaggctattataataacaactggtggtatgtgaaaaatggttgtgtagattttaatgtcaatacattagcatattataataataattggtggtatgtaataaatggtcatgtagactttacagctaatacaattgcgaaaaatgaaaaaggattatggtatgtaaataatggtgttgttgactttggatataatggaacttttgatggattagacggaaaaatatattatataaaaaatggtttagtttaccaaatagatgaggtagaataaagtcataatgattttatggtaaaggtttccacatggaaagacatgtggaaatttttactatagcagtttgaaaattataagttgttaatgaaaaatggtaataactttatatatttttattaaatgagaaaacatgagcagagttagaaagatgcatatgtatacacaccagattatttcgaaaaatattttgtgaataaatttgaattttagaataagataactataaaattatgaaaattaccacagaggacacaacatgcaaaccaacaccaccacacgagataaaacaattgatttcataaagggcatccttattttatttgtgattttaggtcacactacattgggtctgacagacatgtattcatttgatgatacaatgaatggtattgcaaatgtaatatacagctttcacatgccttgctttatcgcagtttcaggcttcttatacagtgaatatgtagggaatgcttcacaaggcatttttagccggataggtcataaagcatttaatatcttcctgccttacgtgatgatttcagttatttactggattattaaatttgccctttcaaatttgataagggagccgattgctgttagcagcttgataagcataccatggaagccgatagagtttttatggtatttatacgcactgtttctcatatattgtgtggcgtatatggctgattatgtgtttgcgaggcttctgccacattttaattataaaatggagcttttatttgtgctgtttttaataattgctttcacatgctatggcagctttcactatgtgggctttaactacatagccggctttcagatgtacttttatctgggatgcctgattaagaagtggcttgataaactggataatagatatgctgtgctgagccttgccgttatgagtgtgcttgtagaggcgtcaggcatagtattacaggatgacataagcagcaatccctttttcagcagtctgtttgagcggcttaccgcctgtatagtgacagtatttatatttgcagtaagctattttctatcagagtattgtgattttcccaagtgggtacagactattggccgtgatagcatgccgttttatgcgatgcatgtgatatttgtaggtggaatcaggattatattggacagggctggtataaccaatatggcgctgcagtgtatatgcggatttgaaggaagcactgctatatgctggatattgtatgagtgtatcataaagaaaatcaggtttatcgattttatattctatccgggtaaacagcttcatatcagaaaatgacaaatagaaatcagggtgttgctttttaatactaatccgctatactatatagtgtttactgaaaaaaatcaaaataaagcgtttcaatagaaaaggaaacaccatgaaatttattaaaattcctgcatttgcaatagttctcctattgctcatgcaaatagtttcaaaggcatttattgccattgacagcagcgatattgaaaatatatatggtttttatgcagagccaaagaacagccttgatatggtcatgattggaccaagtgaggtatacacgggctatgcgccggctctggcgtgggaggagtatggccttaagtcatgcaatctttcaataggagctgtgccatgcaatatgtacaagtccattgtcacggagattgtgaagagacagaggccgaagctccttgtaatcaatgcttctgcatttagtcagggaaattggaatctgactgatgaggtttatctgagaaagtggattgacaatatgcctatgtcacagaacaagcttgacacggtagagactattcctaaaaatatcaataaggatgatgaaaaggtgaaggataacatatcggataccctttattttccattggagaagtatcatggcaactggaaggaccctgaggcggtgtatacctcatttgtcactcgcgcctatatgaggctcagtggtggaggctatctgaagggcttttattcaaaaacaggcatcaccggaggccgtgacaatctggcaaatatcggacagcctactaaagaagcatatgtgctgactgatgagtgcagggcatatcttaaggagctgctttcgtactgcaataagcttggcatagagcatgtacttttgctgcagccacctcatgagacacaggaggctgataagtcgggccttgagcagattgaaagtataacgaaggagtatggatacgattttcttgatctgagtactgattatgagagctctgtagggatagatgattcccatgatttcgcagattttgaacacctgaatgcctatggtgcccaaaagctttcgtcatatattggcgatatggctgtgaatcaatatggtataaagtctgatacggcaaaatcagagctttcaagatggaaaaagtctgtgaagaggactaaaaaagctctgaaaatggcaagagaatatactgacagaggagaggcacaggtggttggagagtatgaggcagccaaataagtgaagctgccggggaattaagcgttgcagaatggtattatttagtggcatttgattcgggctttgatgagccttatgccttcccacaccatctcatcacgcatcagtacaagtagtgccatataagttataaatccggtcacaatcataatcattgtgtgcatgaagctgactgacagccttgcatccatgagcagcagtactataagcatacagactgctgatatgagatatttccacgatagagaaaatattttcgggatgctaagctcatttcgtatgaagtaaagctgtacggcagttattattacctccgagatgacagaggctatggctgcaccgtatgaatagagctgatgtatgagaatcatattcatgacaaaattggctgcggctccgatacatactgagcgtgtcagcaggctttcacgcttggttgttaccagatactgtataccgattacattgcttaagcctataatcggcaacagtgtagccattatcatgatgagatatggcaccttttcatatccctgaccgaaaaaccatggcgagaaattgcgtgcgatgcctatcaggccaaagcacagggcaagacctataaaccagacgaattgaaagctcttataaaggagggcttttacttcgtcttttttattttcactgaaggctcttcctattcttggaagcatcacagtaccgagtgaggttacgagcatgagaaccattttggatatcttgttggcttgctcatagtagccgttttctgtcatgctgccggttatgttgttgagcatggttttgtcaagtgctgtgtatatggttgtcgctatagttggtacaaatagtgtgagagtagcccttagatgagagaatggcttaagctccttaagctttggtctgtcaacatattgaggcaggtaaaaccagatggatatattggcaaaaagctctaatagacatattcctgccacatatatgagcaaatcactctctgagcgtacggcgatgaagataaaagcaatgtttatgattttaaaaatcacatttcggccgactattttgccaaattcctcaagtccctgaaacagccaggagatatcagaagcaactgatatcaggtacacggcttcaatcaatagcaggtgctttttgagcggtgagtgcggaaatgcaagtgtgaataccatatatgcacacagacacacaatcacgctgatgacggatagaagctctatctcccagaaggtttttgtgcgttttgctctgtcctcctgcaggtatgatatttccctgtttccgtagtttacagtgcccagtgcggcaaacatgataaagtacgatacaagtgagtaggtatagctgtatgcacctattccgtctgccttaagtaccctcgagaggtacggcgctgtgatgagcggtgtgatcagtgtgagtatctggtagctcacattatatatgtagtttagttttatactcttgtttttttgtgttttctttttcatgcagatatcatatcacatattgacttattttggctatgcagttattatataaaaatcgcaaattaacattactatcaacttacacgtataaattacgacaggggctaaagcctgtcacataggtggagaaatggataatattataatacgaaacaggaaagaggagtttaaggagcttgttttatacacggtttttggcaatatgacctttgtgatcagcataggtgcatatgccatttttaatgtattttttggtatcaatgagctgattgcgaacgctctggcatgggtgtttgctgttctattttcatatgttaccaacaagaagtgggtgtttaaggctgcaacgcctaccaagacggcatttttagtacagatgtttgcttttttcagtggcagattcatcacgctggttattgaagagactattatatttatttttatcacgcttctggactatcccagcatgtgggtgaagctggtagcacaggtggttgtggttgtgctaaactatgtgataagcaagctgtttgttttcaaaaatcgctaaatgtggtatatttaataaaataataagaactataatagtgtgtatatggtataataaagcgtaaatttaaacgcagtttatgagaagttgatttacatagggatatagaagctgctttttgcagtgtgggacagaaggagaaaatcctatatgagtaatagacttgacatgaaaaaagatacaaataatcgaaaagacaaaacaaaatacgatggtccggagaagccggacgcatacatgggcaatgacaagcaatgggttttcagggcattggtgcttgcttttattgatatgtgcatcattgcaatctcattctttttcgctttgatgatcaggtttgagttttcatattcgcatattccgctctcatttttggagggttatctgcacattgtgccattgtttatggtgatttcacttgtggtgttttatattttcaggctgtaccacagtatatggcgttttgcgagcatcaacgagtttatgcatattattggtgcctttctggtgcttacagttgtgagtgttatcattcatgaggtgtatgagatcaagatgccgtatgccttctggattatcgggctgatgctcagctttgcactgtgcacagcgtgccgttttgcgtacagatttatcaggacaggtcagaagatgctggagcagagaggctctgcaaacggtgatgagagagtcatgattataggagccggaaatgcgggcaggatgcttatcagggagcttatcatgagctcacatctgcacacgaaggcttgctgtatcatagatgacaacccggctaagctgggacgattcatagatggcgtgcctattgtcggcaaccgaaatgacattccggagatggttgagaagtatgatatcacgaaaattgtgtatgctgtaccttctacatccggtaaggacaggaaggatatactcaatatttgtaaggacacaggctgtgatgtgtctgtggttccgggaatctatcagatggtggacggaagagtgtcggtttccaatctgcgtccggtaagcattgaggatttgcttggaagagatccggttgttgtggataatgacggtattcattcatttttacagggcaaggtggtaatggttacaggtggcggtggctcaatcggtagtgagctttgccgtcagatagccagggaggatccgaagcttcttatcatttttgatatttacgagaataatgcatacgatatacagcaggagctgaagcgcaaatatccttatgtaagggtggagacgctgattggctcggtgcgcaatactaacaggttacactatgtattccagacatatcatccggagattatttatcatgcggcagcacataagcatgtaccgctgatggaggaaagcccgaatgaggcaataaaaaacaatgtgcttggcacattaaagctctcaaggattgcagcagagtaccatgtgaagaagttcgtgcttatctctacggataaggcggttaatccaaccaatatcatgggtgcatcaaaacgtctgtgtgagatggttatacagatgatgaacaggcagacggagactgattttgtcgctgtgcgttttggaaacgtgcttggcagcaatggtagtgttataccgctgtttaagaagcagatagaggatggcggtcctgttactgtgacggacaagcgtattatcaggtattttatgacaattccggaggctgtggcgcttgtgctgcaggcagggctctatgctcacggaggcgagattttcgtgctcgacatgggcgagccggtcaagattgatgatatggccaggaaccttatcagactttcaggactggagccggatgtggatattcagattgtatacacaggcctgcgtccgggcgagaagctatacgaggagatgctgatgagcgaggaaggcctcaaggagactccgaacaagctgattcatgtgggtgagcctattgagatggatgatgagctctttgagaagcagcttgagatgctcgagaaggcatgcacctcagaagcaaaggatatcaagcagatagtggcctctgtggtaaagacatatcatcctgacctggagaactaaatatcttttgaagctcataatatagactgtaaaagccggatgtttggcatattttatgccggaagcgaggaacataactatggaaaagagacagatttcattttcaccacctgatataacagaggcagaggtgtcagctgttgctgatgcactgcgaagcggttggattacaacaggtccaagaaccaaggagtttgagaagaggattgctaagctatgcggcacggataaggctgtagctcttggctctgctactgcgtgtcttgagtcgatactcagattcttagggataggtgcaggtgatgaggtcatcacaagcgcatacacatatactgcatctgcaagccctgctgtgcatgtaggtgcaacgcttaagtttatagacgtagcacctgattcatttgagatggattacgatgccctggaagctgctattacagaaaagacaaaggttatcgtgccggttgatattgcaggtgtgccttgtgactatgacaggatttttgatattgtggagagaaagaaggctcttttccatccgtcaaatgatgtgcagagggcaatcggacgtgtgattgtggcggctgactcagctcatgcttttggtgcttcttacatgagagcaggtgagcggattatgtgtggcaatgtagctgattttacaagcttttcattccatgcggtcaagaatctgaccacagcagagggaggagcactcacctggagacctatagagggctttgatgacgagtatatctacaagcagtttatgctgctttcactccacggacagacaaaggatgctttgcacaagaatggtctgggcaactgggagtacgatattgtggctccttcgtataagtgcaatatgactgatatccaggctgctattggtctggtacagcttgacagatatgaggggcttctcaagaggcgccgtgatattatagagcgctatgatacggcatttaagccacttggacttttgactgtgcctcattttacagacaggcatacatcgagcggacatctgtatctgcttcgcataccgggcatcggcgtggacaggcgcaatgcgcttatagtgcagatggcggagcgaggtatcgccacaaatgtgcatttcaagccacttccgatgatgacagcatataagaatatgggctttgatatagccgattttccaaacgcttatcatcagtatgagaatgaaattacacttcctctcaacacaaagcttagcgatgaggatgtggagtatataattaataatttattggagattttacatgagtagatggagaacatggggagagattcctacattcatgaaaaatgattttacacttaaatattacaggcatctgagcagaaagaggacaagcatggtattcaaacgcatttttgatatgattatgtccactgttcttcttgtgctgctttcgcctgttatactggtccttgctgtctggataaaggtggatagcagaggacctgtttttttcagacaggagcgtatcacacagtatggcaggaagtttcgcatattcaagttcagaaccatggtgaatgatgctgacaaaaagggctcactggtgactgtcggtggggattcaagaatcacaagagtcggtgctgtcatcagaaagtacaggcttgatgagattccgcagcttataaatgtgctatgtggtgatatgagctttgttggcacaagacctgaggtggagaagtatgtcatggcatatactccagcgatgatggcgacacttctgatgcctgccggaatcacaagtgaggcaagcatcaggtataaggatgaggacaggcttcttgaggcttctgatgatgtggattacacatatatccacaaggtgctgccgggcaagatgaggtacaatcttaagtatcttaagagattttcactgataaatgatatcagactgtgcatagagactgtgcttgcggtaatacattagtctgcttgtcggggaggatgatacttatgaataaagtcaaattttcagtattactgtcaatttattacaaggaaaagcctgagtatttcagggagtgtatggaaagcatatattcacagactgttttaccggatgagatagtgctggtggaggatggccggctgacagaggagctttatgaggcaatcagtgattatgaatgcaggccttcggaaataaattttgttacggtaaagcttgaaaaaaacagcgggctcggtcttgcacttgctgaaggcataaagcattgctctaatgagcttgtggccagaatggatacggatgatatatgtgtgcctgaccggtttgagagacagctgaatgttttttcggaaaatccggggcttgatatcataggcggctacatcagcgagttttccgatgatacacgtaatattttatcggagaggacagtgcctctcggaaattatgtgataaagcagtatcagagaaagcgcgatgcgttcaatcacatgactgtgatgtacaaaaggtctgcggtgcttgctgcaggcaattatcaggactgtctgcttatggaggattctcttctttgggcgaatatgatcagaaatcactgtcgtatggcaaatataggtgagactcttgtgtatgccagaaccggtgatgatatgctgaagaggcgtggcggctttgattatttccttaaatacaaggcaggaagaaagcgtattttaaagacagggaccataagtgcggccgattattttgttacggttgcggcacagcttgttgtctgtatgatgccactttggatgaggagcctggtgtttaaaaaaatattaaggaactaaaacttttcaaatgcacgttaatgtggtaaaatcggtatagttaacattaataggcttattactagctgatacaggaggttaatataaatggattttagagctgagtacgagaaatggtgtacagacccatattttgatgaggctacaaaggctgagcttaaggctattgcaggtgatgataaggagatagaggacagattctatcgtacacttgagtttggtacagcaggtcttcgtggtgtaataggagccggcaccaacaggatgaatatatacacagtccgtcaggctacacagggactggctaattacatactttctcagggagaggacgcagtaaagagaggcgttgcaattgcgcatgactcacgtaatatgcatgatgagttcacagatgccacagcactctgccttgcagcaaacggaatcaagacatatgtattcccacagcttgcacctgttccagagctgtcatacgcagtaagaacactcggcacaatagcaggtgttgttatcacagcaagccacaatcctcgtgagtacaatggatacaaggtatactgggaggatggtgcacaggttactccacctcatgatacaagcatcatggatgaggtggcaaaggttacatcatttgatcaggtaaagactatggacaaagctgctgctattgaggcaggtctttacaatgtcatctctgatgaggttgaggagggatatttcggagagctccgcaagctttctatccatccggagattatcaaggctatggcaaaggatatcaagattgtttacacaccactccacggcacaggtcttcgccctgtacagagagtacttaaggatatgggctttgagaatgtatacattgagccaagtcaggcagtacctgacggcaatttccctacatgtccttatccaaatcctgagaatcctgatgcatggaagcttgcacttgagctggcaaaggaaaaagatgctgatattgttttagcaactgaccctgatgccgacagactcggtgtatactgcaaggatacaaagacaggtgagtatgtgacatttacaggaaatatgtcagctatgcttatcggtgagtatattttaagccagaagagtgccaatggtactctgcctgagaatcctgcatttgttgagtcaattgtttctacagatatgggtaaggcaattgcggcagcatatggcgtaaagcatatcgaggttttaacaggtttcaagtatatcggagagcagatgctcaaatttgaaaaaaccggctgcaacaattatgtattcggtatggaggagagctacggatgtctgccgggcacatatgcaagggacaaggatgctcctgcagcagtttgtatgctgtgtgaggtagctgccttctacaagtcacagggcaaaactctctgggatggcatgattgacatgtacgagaagtatggctactacagagagggcatttccacaatgaccttaaagggcattgatggtgctgcacagataaatgagattatgacaaaggcacgtgccgctgagccaaagaaatttggtgattatcaggtgcttgctatccgtgattacaagaatgacacaagaaaagatatgacaacaggaaaggttgagccgataggtcttccttcttctaatgtactttactacgaacttaacgataacgcttggtgctgtgtacgcccttctggtacagagcctaagattaaattctatttcggagttaaaggagtgtctcttgaagattcacaggctaagcttgatgctttgtcagctgaggttctcggacagtttgaataaagactatgatgaaaatatacatttgcccggattgtggctggatacggatggtttcaagaagaaaagaggttgaatgcttcaagtgtggcaggccgcagatgcgtctgacgaatctggagtttggaaagtataccaatatgtcagagaaggagcgtcaggactacgcagacgcgtggctttacattcataggaaaaaggaaaaataacatggcaaagaagagaagaagaaaaaagagaagaaatggacgtaagaagattatactttttgtatttgaaatcctgctgctgttaattgttctgttagtggtttgggcttataataagacactcggacaggttaaatatgaggatgcgctgacaaatagtgaggccggaatcaatgaggatattgatgatgatgctcttgccaatatgcatggatatctcaatgtagcgttgtttggtctagacaacagaagtaatggttcatacgatgaggggcattccgattgtatcatgatcgctagtctgaattatgatactaaggaggttcagattgtttctgtctacagagatacgtatctgcctataggcaatggaaagtttgcaaaggcaaatgcagcatatgctaatggtggggcgaagagggctgtagctatgcttaattcaaatttggatttgaatataaccaagtatgtctgtgttgactggaaggctcttgtagatgctatagatgatatcggtggccttgatcttgagattactaaggcggagatgaaggaaatcaattatctgattcctgaggttgattatactacaggatataatactccttatcttgagggggatggtatgcagcatcttgatggaactcaggcgacatgctatgcacgtatcagaagcacctccggtgatgatttcttaagggcatcccgtcagagaattgtgcttcaggctatgcttgacaaggctaaacagtcagatttaggctcgctcacagagatgtgtaaggatatcatgagtcagataagtacaaactttacagctgccgagatattacagtatgcttcttatgttacaaagtttcagatgaaggagacaacaggcttcccatttgagctgactacaatgaatctgtcaactactggcgataccgtaattcctatagacctggcacagaatgtttctgagcttcatcagttcctgtttaatgagactgattaccagccgacagataccgttcagacagtaagtgataagattgctaaaaagacaggtgttacgtctaagacatcagcatttgatctcacgcagtacaatgatactgttggctctgatggaaccgaaggggcaaagaaaaaaaataaggacaagcaggatgccctgaaaaagagccagtcagaatctgaaaatggttcagaaaaaaaatcatcatcagatgattaaataattaaagttagctattagggagattatttattatgaaaccggaaatcaaagaaaaaatcacggcaacaaaccagaaatacttaaagaaattcttaacagaggaagctccggctaagcttgagagccagcttgagcacatggactggtcataccttgatatgattcacaacaaggagcagcagagaggtgaattttcaccgcttgctgctatggagctttcagagatagaggcaaataaggacaaataccttgcaacaggtcttgatgcggtcaagaatggcaaggtcggtgcaattcttcttgccggtggacaggggacacgtcttggctttgacaaggctaagggcatgttcaatatcggaaagacaaaggaactctatatctttgagcagcttgtcgcaaacctcatgaaggttacaaatcagaccggtacatgggtgcctctgtatgttatgacaagcgagataaatgatagcatgacaagagagttctttgaagagcacgactattttggatacaacaaggactatgtgaagtttttcgtgcaggagatggttccggcagttgattttgatggaaatctgctcatgaaatctgaggattcacttgctatgtcaccaaacggaaacggtggatggttcaagtcactcatcaatgccggtcttgacagggatttgaaggacaagggtgttgagtggcttaatgtatttgctgtggacaatgtacttcagcagattgcagatcctgtatttgtaggtgctacaatcgagtccggctgtgtcagcggctctaaggtggtcagaaaatgtgatccatatgagagagttggtgctatgtgtcttgagaatggcaagccttcgattgttgagtattacgagctcactcctgagatggcagaggcaaagaacgagaatggttcattgcagtatggttttggtgttatcttaaactatttattccgcgtggacaagctcatggctatcgcagagaagagccttccacttcatgtggtagagaagaaggtgccttacattgatgagaatggtacagagcataagcctgagactccgaatgcatacaagttcgagacactcatcctcgatatggtatacatgatggacaatagcctgccatttgaggtagacagagagaaggagtttgcacctgtaaagaatgcgacaggtacagattcggttgaaacagcgagagctcttcttgagaagaacggaattgaaatttaatatatgatttatggtaactgttcattggcagggatgtattgatattctgcaatttctatttatcgcagactcataggtgcatctgccgatgagcagttatttttataatcgcatagtggcctgcaatggggaacatagactataaatagttaactgatttatgaaaaaataaataatcccgtcacaaattaaacacagattgacagtatacttctaaatataaacgaaaggagaaattattatggataacaattatggaaatatgaatgacacaaataatacaaataatactaacagtacaaataacaatacaaacaatgtaaatttcacaatgtcgggtaatccttacaatccggatgagtcacagaaggctgcacagactaataatacatcagctgaaagctattcacagagctacaatccatattcgcaggcttctgcagcaggacagccaaatacaaaccagtcatatgcaaaccagccttattctaatcagtcgtataattcaggcacaaataataatgcatatggcggcacatcagcaggttcgacagacaattcatatagccggatgaatatgaatggtcaggcataccagcagactgcaaagcctaagaaacagagagcacctagaaagcctggtgcatttggaccatttgcagcaaagacagtagcggcagctcttatcttcggactcgtcggaggcggcgttttcacaggagtaagctatattggcacgagagctatttcaaattcttctactgcaagtgcaaagcttacaactacaacatccggagggactaagcagacatcctcaggggatgcaaaggatctgacagatgtatcatctgttgtcgatgaggttatgcctagcatcgttgctatcacaaatacaggaacagtcacctacaacagctttttcggaaagcagtcacagcagtctcagagctgtggctcaggaattattgtgagtgaggatgatgattatctttatattgctacaaacaatcatgttgtggcagattcagaggagctcacagtacagtttgatgatgattcagtggtaaaggcagaaatcagaggaacagatccggatgacgatctagcagttgtacgtgtaaagaaagcagatcttggaaaagatacttactcaaatatcaagattgctacaatcggagattctgaaagtgtagctgttggaagtcctgcaattgctatcggtaatgcacttggatacggacagtctgtcacaacaggtatagtaagtgcgcttaacagaactgttactacacaggattcacagacaggtgagactgttaccaacaacaagcttatccagacagatgcagcaataaaccctggaaacagtggtggagcactcttgaatgaaaatggcgaggttatcggtataaactctgtaaaatattcttcaactgaggttgagggtatcggatatgcaattcctatgtcggttgcaaagcctattattgagagtctcatccaggatggaaagtatacaaacgagaatcaggcataccttggaataaagggtggcgatgtttcatctgagatggtagcctacggcttcccacagggtgtgtatgtttcatctgtttcagctggttcaggtgctgcaaatgcaggcttacaggagggagatatcatcactgctgttgacagcacaaagatttcttctatgacagagctgcagtcagcgttaaagagctacaaggccggagataaggttactcttactgttgcccgtcagagtggcagacagtatgaagagagcaaggttgaagtaaccttaagctctgcaaaggatatccagcagtaattccggcgcagtgtattggcgggaggtcgggacataagccccgggtaccggcggcgcacacgtactcttgcggtcgctacgctacgtggctaagatactgtacgaaattatgcttgaagggtttctatgcttgacgaaaccgtcgaaacgcgccgtccgtggcgcgttttctcctcacccctgcgtccatgcaggggtgtttctacgtttcatgggcataatttctacagtatctaagccacttcgctattcgctcctgcaagagtacgtgtgcgccaccggtgcccggggcttatgtcccttacgctgtggcggaattgtgcttacgtgtgcgccgctgctatgcgcggcttacgttcgctatgttgtggcggaaatgttgttcaaatcagttcaaagtactagacaaattccctaaaatattagataatgtatataaataattttacttttgcaccgcatatgaattcttcaaaattgatggtttatatgtagatttatcatagtatatacatcggtttatgattatgagatataatacacattgagcggatgcagcataggaggtcggcatgaagaagaaaaaaatagttattgcactcggacatgatgctcttggaacaactcttccggagcagcacgaggctacaaagcatacagcaaaggcagttgcagattttatcagggacgattatgaggttgttatcacacacagcaacggaccgcaggtgggcatgattcacaccgctatgtctgagttttgcaggatttatcctgagtatacagctacacctacagcagtctgctctgcaatgagccagggctatataggatatgatttacagaatgctatccgtacagagcttcttggcagaggaatttacaagaccgtttctacaatacttacacaggtggttgttgacccgtatgatgaggctttttatcatccgacaaagatcattggccgtgttatgacagaggctgaggctgaggaagaagagaagaagggcaaccatgtgacacaggttgagggaggctacagaagagttgtggcagctccaaagcctgttgatatagtggaaaaggatgctattaaggctcttgttgatgcggatcaggttgttatcgcatgcggtggcggcggaattcctgttttagcacaggataataagcttcagggcgcaagcgctgttatcgagaaggatcttgcagcaggaaagcttgcagatactcttgatgctgacagacttgttatacttacaagcgttgacaaggtctgcctgaactatggcaaggaggatgagaagccgcttgataccatgactgtcgatgaggcaaagaagtaccttgcagcaggcgagtttgatgagggtaccatggctccaaagattgaggcggctatcgactttatcggtgactctgccatccgttcagtgcttatcacaaagctcaacaaagagggcaagacagtttcaggtggtatgggcactttaattacaaagtagagcttaattgttataattcacatatatcccacacgtctatatgcattttgcatgccggatgtgtgggtagttttataaaaacatagtgcggttttgcgaatgtgcgtggggcggttctgaagagttgaaaacaaggtaactattcagaacccccgagaacaagaaaagtaagatagaaggtaacacaaaatgagtgagaaaaggcttcaaaagagagatgaaatctcagatgagtacaaatggaagcttgaggatatgtatgagacagatgagctgtgggaggctgagtgtgaaaaagcgtcacagcttgcagaaaagctatctggatttaagggacatctggccgacagtgcagcaacgctgcttgatttttttaagaagcaggatgagctgtcttattatttggagcgtatagttgtctatgcgaatgagcgctcgcatcaggacactgctgtgtcgaaatatcaggcatatgtgtcaaaggctgagacactgactgtccaggcatcaggtgcgctggcatttgcgagtccggagattttgcagatagatgataaaaggcttgagagcttttacagtgagagcaatgagcttatgcactataagcgtgcgattgatgagataatgcgtcagaaagcgcatactttatcggctgcagaggagaatatcctggcgcagtgcggtgagatggctgcagcaccggagaatatattcagcatgttcaacaacgcggatatcaaattcccgtatatcactgatgtagagggaaataaaatccgtatcacgcacggcaatttcatagattttttaagcagcaaggacagaagcctgcgcaagcaggtgttccgtggagtctatgattcgtacaagaagtggagtaatactgtttccatgatgtacatcagcaagctgaaaaatgacactttttatgcaagggttagaaaatatgacagcgcaagggccatgtatttatccgatggcgatattcctgagagcgtatatgacaatctgattgagacggttcacgcacatctaccggctctgcacaggtacatggcgcttaggaagaagcttttaggtgtggagcatctgcatatgtatgatttgtttgcaccgattgtgggcaatgtacagaccacatacacctatgatgaggcaaaaaagcttgtggcaaaggcgcttgagcctatgggcgatgagtatgtcagcacacttaaggctggcatggagagtggctggatagatgtatatgagaatgagaacaagagaagtggtgcgtattcatggggcgcttacggcactcatccgtatgtgcttttgaactatgccgacaatctggacagtgtgtttacgctggctcatgagatgggacatgcgatgcatacatactattcaaatgagcatcagagcatcacctacgcaggatacctgatttttgtggcagaggttgcatccacctgcaatgagtcgcttctcatgcactatatgcttgagcattgtgaggatgagaatgagagaaaatatctcatgacacattttctggacggcttcaggacgacacttttcaggcaggcgcagtttgcagagtttgagcatatagcacaccggaaaatgcaaaagggcgagccggttactaaggatgtgctaaatgagctatggcatgagctgaatgtgcagtactacggaccggatatgcgcgtggatgatgagatatcatatgagtggatgcgcataccgcatttttacacaccgtactatgtatatcagtactcgacaggctattcggcagcagttgctttttcaaaaaagatacttgaggagggaaagcctgctgtggataagtatataggaaatttcctgtgcggtggatgctcgaagaatccaatcgagctgctaaagagtgccggtgtcgatatgagtacaccaaagcctgtggatgacgcactcaatgtatttgaggattatctgaagcagtttgagacagcaactaagtaaggagaaacatttttatggaaagaattaaaagttttacaattaatcataatattcttaaacctggattttatatttcaagaaaagacggagaaatcgttacatacgaccttcgtacaagaaaacctaatgcaggcgattatatgtccaattcagctatgcactcagtggagcatatg

SEQ ID NO: 1159 - DNA, 20936 bp, unidentified
  source 1..20936: mol_type = unassigned DNA
tcggatttcgccttcgacggctgcgcgccgggcatacgggtgttcggcggcgtgtatgcagggcgaatggcggccaatcccgcaggtgaataaagacacaggcattctggcgctgacaacgccggagtttttgacaaaaagaagttattcatggatattgtgcgcgatggcgaatttttacggcgcgctgaccgtgcagcaggccttccgcatcattgagcagcagaatccgggcctgacgacgcaagacgaggtgagcgctgttttgcaccgcgaggaagacgatgccgcgtcggcgacatcggcatggaaagcgcggtcaacgagatgaaaccctatctgacgacgcagcgcctgcttgaaaaatttcttttgctctatacggagctgcacaacacgacgcgcatgccggaaaattacggtcataccccggaggaactttttgaaagcgaaagaatcaagcggacggtggggcgcaacgatccctgcccctgcggaagcggaaagaaatacaaaaagtgctgcggcagaaacgtgaactgaaaaagttacatcaagaggcgttcggacgaggaaaaaaatccgaacgcctctttttgtttgaaaagaagtaagtatgaaatcgattgtgcacgctatcactgctgtaatcacagcgataatgctgcttgcggctctgacctgcggacgaactggcgcggcatagcaggaaaccgcataaaggttatccgcatattttttccatgccctgcacagcctacggcttagaaacagcggaggcgaagcgatgagggcaaaatggacggatttggccgtggaagcggcgggcggcgcgctgcgcgaaaacggcctgtcgcgcacggtggtgaaggtggaaaacgaggagagcgcgcaaaagctgggcaggccgatgggaacctatatcacgctggcttgcgaacaggcgatgacggtttcgctggaaacgcggcgcgcgctggcggcggaactggcgcagacgctccgcggcatgctgccccccgacatgaagacggcgctggtcgtcgggctgggcaaccgaagcgtgacgccggattcgctcggcccaaggacggcggaacgcgtgctggtgacgcggcacatgggggattgcctgccccgcgatgtgccgatgagcagcgtgtgcgccgccgcgccgggggtgctcggcgtgacgggtatggagacggcagaaattctgcgcggcatggtcgcccatgtcaagccggatgcggtgatcgccgtggacgcattggccgcgcgaagctccaaacgcattgcctcgacgatccagatcacggatacgggcattacgccgggttcgggcgtgggcaaccatcgcaaagcgctcgaccgccggacgctcggcgtgcccgtgatcgccgtcggcgtgccgctggtggtctatgcttcaaccatcgcttccgacgcgctctgcgcattgggcgaaggcgaagtggaggaagagcgcattgccgcgtgcgtggagcgcgtcgtttccgaaaagctgggggagatgatcgtcacgccgcgcgatgtggacgcgctggtggaacgcatggcgggcgtgctggcggacggcatcaatcaggcgctgcatcccagcctgagttcaagcgaaatcgcgcagctgatggcgcagtagagggggagagccatgaagatgaaaacaggactggcggcgctggtgaccgcgctgctcttgttgccggggatcgctcaggccgacgaactgccgatgaaagcggaagcacccatcaccctgaccagccccagcgcaattctctgcgaggcctcgacgggacaggtcatctttgaaaagaacgcggacgagcgccgccctgtcgccagcgtcaataaggtgatgaccattttgctcaccttggaggcggtcgatgaggggcgtgtgtcgctggaggatcaggtgacggtttctccgcgcgcggcgagcatgggcggcagtcaggcgtttctcgacgcgggggagcgctacaagctcagcgaactgctcaaaacggtgatcgtcgccagcgccaatgactcggccgtcgcccttgccgagcatcttgcggggacggaagagagttttgtgcggctgatgaacacgcgcgccgaagagctggggctgacgaacacgcattacgccaactgcaccggcctgcccgcacaggaacactataccaccgcgcgggacgtggccaaactcagcgcgcagcttgatctgcacccgatatattatcgctattcgaccatctggatggatgaaatcaagcaccgcggcgggcgcgtgacttcgctgaccaacaccaatcggctgattcggttttatcccggctgcgacggatataagacaggctcgaccaatgaagcgcgctattgcgtcagcgcgacggcgaagaaggaggggatgcggctgattgccgttgtgctcggcacgcccgccggacagacgcgctttgacgaggcgcgcgcgatgctggaatacggctttgcaaatgtgcagcttgtgaccccgattgcacaggggcaggcgctggatatgaccgtgcctgtgcgtctcggcgggcgggacgaggtttccgtgcttagcggcggcacgtgcagcctgctggaaagacggggtgaaaagaacgcgctttcgctggaagccgcgctggttgagaaggtgaatgccccggtctacgcgggcgatgtgctgggcgaaatccgcgtgaagcgcggcgacgaggtggtggcggtcgtgcccgccgttgccggggaagacgtgcagctgccgggcatggtcgatgcgctgattcgcattcgcgaccactttatgctcaccggggcttgacattcaaggagcggcgtgcgatactcaaaaatacggggaggacgattgggactctgtcccaaaccctggcagggaaataatttccctgcacccttacctttatggattgcgttgcaatccataaaaaacgggaagtgcaggaacctcaggttcctgccggagtttgaggcggagcctcaacgtcttctttctaaaaagcaaaagaggggtttgttgtgagtttgaatgaaaatccggcgcccaaaagggagagcttcgcttcccgattgggctttcttctcgtcagcgcgggctgcgccatcggcatcggcaacgtgtggcgcttcccgacggtcgcgggccagagcggcggcggcgtgttcgtgctgttctacctgatttttctgctggcgatgggcgttcctgtgctgacaatggagttggctgtcggacgcgcgggccgcggcacagcgacacaggcctatcgcgcgctggaaaagaagggcgcgaagtggcatctgcacggctatctgtgcctgctgggctgctgcatgctgatgatgtattacacaaccgtcagcggatggatgctcagctatttcgtcaaattcctgaccggcacattcagcggcctgaacggcgatgcggtttccggcgtgtttgggcagatgcttgctagccccggcgaaatgggcggctacatggcgctgaccgttgtgcttggcttcgccatttgcagctttggcctgcaaaacggcgtggagcgcatcaccaaggcgatgatgtgcgcgctgattgtgctcatcgccgtgttggccgtgcatagcgtcacactttccggcgcaaaagagggattggcgttttttctgctgcccgactgggggcgcgcgatggagcagggaatcggcagcgtgatcggatcggccatgaatcaggcgttcttcacgctcagccttggcattggcgcgatggagattttcggcagttatatgagccgcgaaaacacgctgaccggtgaagccgtgcgcatctgtgcgctggatacgtttgtggccatcagcgcggggctgattattttccccgcctgtttttcctacggcgtctctccggatgccgggccgagcctgattttcatcaccctgcccaatgtcttcaccggcatggcgggcggccgcgtgtggggaatgctgttcttcctgttcatgacgtttgcgagcttcacgacggtcgtcgccgtgtttgaaaacatcattgccagcacgatggagttgttccgcatgaaccgccgccgcgcgtgcgttgtcggcgcggtatttatcctgctggccagcgtgccgtgcgtgctggggttcaacctgtggagcggtttccagccgcttggcgcaggcagtaccgtgctggacggggaggatttcatggtttccaatctgctgctcccgattggcagcttgatttatctgctcttctgcgtaacgaagtggggctggggctttgacaaatatctggaagaagcgaacgcgggtaagggcatttgcctgccgcgcacgctgaaaccgctgctgcaattcgttctgccgattctgattgtcgtgattatcgttcaggggctgatttaagcctccaagaaagcaggcatagcccgcttcagactgtagacaaaaagctattctccccccgaagggggagaatagccctttccgcaaatgaaagaatagctgaatttcttgattttgctatccaagccaagtttgcttatgtcaacaagctgaaagcgggcatagcccgctttcttgttttacatgaaaacaaaagaaaagcaaagcgacaaaaaagcgtccctcttgcgaggaacgcctgatttcgctttgcttcttactcagcggtgtagggcagcagcgcgatggcacgggcgcgcttgatggcctcagacagctgacgctgatgcttggcgcagttgccgctcatacggcggggcatgatcttgccacgctcgttgatgttgcggcgcatacgggagttcacatcacggaactccttgtagtcgatgtattcgatcttatcgacacagaacgcacaaaccttgcggcgcggcttacggccgcgcggacggcgtgctccacgatcttcagacatggaagttctcctttcgtcaccggcagggccggttcaacaaattcatctcggaattagaagggcagttcatcgtcatccacctgcgtgaacccggcatctgcgggggcataggccggagcctgtgcgcgcggcgcggcggcgggggcggcaggggcttggtgataatcgccggaaggggcgccgttagcccgattggcagagggaaggaactcgacctcgtcggcgacgatatcaaacgcgctgcgcttgctaccgtcctgcgcttcgtaggtgcgggtttggatggaaccggtgacggccaccttgcttcccttggtcagataacggccgcagagttcggcaagctgacgccacgcgacgatgttcaggaaatccgtctcctgctggccggtctgcgcgttgcgaaagcggcggttgaccgcaatgctgaagttgcaaaccgaaacgccggactgggtggatctcatctcagggtcgcgggtcaaattgccgatcagaaaaaccttgttcatatactctgtttcctcttgctttgcgaatggcttcgctcagttggcgatgtttcgcttacgcctgctcggcgggagcggcctcggccggggtctcctcgctcaccggagcgacgcgaaccggacgcggcttcacgctgctcttcttttcaagcagcttgacgatctgagaacggatgacgttctcgttgatgccgagattacgggagagctccttgggcagctcggaagcgccgttgaaagcgacatacacgtaataaccttcggtcttgtagtcgatagcgtaggccagacgacgcttgccccactcctcaaccttgacaacctcgccgccgttggcagcgatgataccgttgaacttctcgatgagctccttgcgggcggtctcctcgacggcggtatcaatgatgtagatcagttcgtacttattcatgatcctttcacctccttttggactctggctctgcaatgttccatgcagaacaaggatgtgccagttgtgtatgatagcacagaaatcgcgaaaaagcaagggttttccccgcatttttttcccgaaacggcgcaaaaatgagaaaaagggacgatttgcgcgccaaagccatgccaatcagcgcaaagcgcggataaaacccttgacgaaccaagggattacggttataattgcacggatagtctgtttcaactgacccatggggtttgaaggtaaggaaagtaaaagaaaactatgtttgtcgatcaggttaaaatcaccgccaaggccggaaacggcggcaatggcgcggtctctttccatcgcgaaaagtttgtgcagaacggcggcccggacggcggcgacggcggaaacggcggcgacatcgtgctgctggccgatccgaatatgcacacgctgatggatttccgttataagcgcaagtatacggcggataacggcgaaaacggcgcggcggccttgtgccgcggcaagagcgccaaagagcttgtcatcaaggtgccggtgggcacgacggtgcggctggtctcggacggtcgtctggtggctgatatgcacgaggccggtcagcgccatgtgctgcttcacggcggccgcggcggctggggcaacgcgcatttcgccacgccgacccgccaggcgccgaatttcgccaagccggggcagaagtgcgaaatgaccgagtttgaactggaactcaagagcattgcggacgtcggtcttgtcggctatccgaatgtcggcaagagcacgattctctccgtcgtgacggcggccaggccgaagattgcgaactatcacttcactacgctggccccgaatctggggatttgccgccagtacggcatggatttcgtcatggcggatattcccggcctggtggagggcgcgagcgaaggcgtggggctgggcatccgtttcctgcgccacgtggagcgcacgcgcctgctggtgcatgtggtggatattgcgggcagcgaaggccgcgatccgattgaggatttcgagcatatctgcgatgagctggtcgcctatggcgatctggccgaacggccgcagattgtcgccgccaacaagatggatctgccgggcgcggaagagaatcttgagcgtctgaagaagcatctcaagggtacggacattgaggtttatccggtttccgccgcgacgcagcagggcttcgacgcgctgatgggcgcgattgtgcgcattctgccgactctgccggacaggcgcgtctttgaggaagaactgccggtcgagacggtcgagcaggcgccgttcaccatcgagaaggacggcggctattacatcgtttccggcccggcaatggagcagctcatcgattcgatcaacttcaccgatcaggaatcgctgaattatttccaccgcaccctgcgcagccgcggcgtgatcgacgcgctgcgcgcagccggcgcgaaggaaggcgacagcgtgatcatcggcgagatggaatttgactttgtggagtaaaacgccttccgtcacggcttcgccgcgccatctccctcaaagagggaggcatggtgtcggattaacgcatgaaagggctccctctcagagggagctgtcagcgaagctgactgaaggagaaaagaaaggataacttatgacgagtaaacagcgcgcgtatctgcgcggcttggccaataccatggagccgattatccatgtcggcaaggatggcgtgaatgaaaatatggtgaagcaggcttccgacgcgcttgaagcgcgggaactgattaagggcaccgttttgcagaacagcccgatgaccgcccgcgacgcgatcgccgccctctgcgagggcacgaacgccgagccggtgcagtgcatcggcaaccgtttcgtgatctatcgggccagagagaaagacccgaagatcgtattgccgtaaaaaccgaaaacaagcggaggatcgccgagtttgaaacggagcgatcctttttgtatgcctgccgcgtatttttgtcttgctttttccggctgttgacgctacaatgaaaactcaaggtgatgaagcatgaacgacaaaacagatttaaacgggcgaaagggcggattcaaatgggcggacgcattgtcgttttcggcagctatgtgacggatttgaccggacggggaacgcgtttcccggtgccgggggaaacggtgctgggcgcatcgttccaaatggggccgggcggcaaaggttccaatcaggcggtcgccgctttccgcgccggcggagatgtcacgctggtcacaaaactgggacgggatgcgtttggccgcgccgcgcgcgatttttataccgcggagggcatgaataccgatgaatggatcgaggatgaaacctgtgaaaccggcgcagcgctgattatggtcaatcagcagagcggtcagaacatgattatggtgctcaacggcgcatgcagccacatcacaccggaggatgtccgcgccaagcagacgctgatcgagcaggcagatgtgctgctcgttcaaatggaaatcaatgtggatgcgctggaacatgtgattcgcattgcccatgaaagcggcgtgcgcgtcattctcaatccggcgccggttcagaaaatagccgatgaaatgatggccatggtcgataccgtgacgcccaatgaaacggaggcggccgcgttgaccggggtggaagtggtcgatttggaatccgcccaccgcgcggcgcgggtacttttgaataagggcgtgcgcaacgtgatcatcacgctcggcggaaacggcgtatattgcacggatggaatgcgcgaggagctgatcaaccgcattgctgtggacgttgtggataccaccggcgcgggcgacgcgtttaacggcggttttgccaccgcgctttcaaacggaatggagctgtttgacgcggttcgctatggaaactgcaccggcgcgctttccgtcaccaagccgggtacggccaaagccatgccttgcaaggcggaaatcgacgcgctttatcaggcgcgttacggcggatgaacagccgttttgcatcgaaaaataaatgcgccgctgaccggcattggcctgggtcggcggcgcgtttgtatgtggcgtgaatcgggcggctcttacgctttcagcgcgtccactgtcttttccagcccatccacgttttcgatattgtaacagtttaccgatgcgccgagcgtcttgcggacaaagccgctgagcgccgtgccgggaccgatttccacgaacgtatccacgcccaaacgcgccagctcacggagggtgtcttccatcatgacgggggaaacgacctgccgctccaacagcgacgggatagtctcgctccctttttcctggccgagacagttgaagagcacgggaatctgcatttcgccgaagggttcggtcttaaagcgctcgtgcagcgctttggcggcgggctgcatcagcggcgtgtggaacgggccgctgacgcgcaggggcagaagacggcgtgcgcccgccgctttcgccagttcgcccgcgcgggcgacggcatccgcttcgccgccgatgacaatctgtccggggcagttgtagttgcagatgcgcaccatgccgcccgcctcttcgcagcagcgcgctatcgattcgcggtcgagcatgagcacggcggtcatcgcgctgctcacgccttcgctcgcgctggccattgccgcaccgcgataggcggccagttcgattgcggctttcgcggcgaacacgccggaggcttccagcgcgctgtattcgccgaggctcagtcctgcaacgtaatccggacgaatgcccgcgtcgaacagcgccgccgtcacgccgcaggcgaacgcaaccatgcacggctgggtatactgcgtctggttcagcgtctcctgagggccgtcaaagcagagcgcatgcaggtcaaaatccagctctgccgcgtcgaatgccttgcggaaggcgggcgacgcggcgtaaagatcccgtcccatgccgacgcgctgactgccctgcccggcatacagaaaagcggttttcatgtcagacctccatatacacgcccgcccacgtcagaccgccgccgaagccgacgagaatcatcttttggccgggctgcaacaggccgttttcgcgcatttcatccagcgcaagggggatgctggccgcgctggtattggcgtaacggtcgaggttgcggtaaaacttttcggcaggcatgcccagacggcggatgcttgcatccagaatgcgcacgtttgcctgatggcagacgacccaatcaatgtcgtcggtggtgattccggctttttggacgagcgcattcacgcactggggaatggtcgtcacggcgaagcggaagacggcctgtccgtccatcgtcatgtgctgcgcgcgcagcgggccgccgacgcggatcagcgtgtcgccgcgcacgccgacgatgtgttcatacggcgcgtccgcgcaaagctcgaagatggccgcgcccgcgccgtcgccgaagagcacacaggtgtttcgatcggtcatatccagaacggaactcatctgttccgcgccgatgacaagggcatagcgcttctgattggccagcagcaaaccgcgcgcagtttccattgcgaacagaaagcccgcgcaggctgcgccgacatccatcgcggggatgtcctgcggcagaccgagcgcggcgtgaacgagacaggccgtgctcggcatgacgtattcgccggaggaggtcgccacgagcacgcagccgatttctgacggattcagaccgctggctgcaagcgctttttgggcggcgtcgatggcgagcgtcgtggcggtttcgccctcgccgcagaaatagcgctggcggatgcccgtgcggctggcgatccattcgtcgctggtttcgacatagcgccgcatgtcgtcgttgctgacggcggtttggggcagcgcgcgcccggtggagatgagtttcagtccgttcatggaaaaacctcgtttctgataaaacgtaaagacgattgggactctgtcccaaaccctgccagaaacctgaggtttctggacttcccgttatgttaaaataggtagttttgacatggttctaaaatcagagcgctttcacggaaaaagacgttgactttaatttgaaacaatcattgtgaaagaacaaggcctccctccttgagggaggtggcgcgccgtaggcgtgacggaaggagttaaaaagcccgttcggattgttccgcacgggcaaaagggcttacttgttttcctgcaaatacttgagcaggtcgccgatggtcagcatggtggccatcaggccgtcaggcatgctcacgcccagcttatcttcgatcgccatgctcagttccacggtatccaggctgtcggcgcacacgtccggcacaatctgggcttcaagggtgacggcgtcgggattgcagttcggcaacgccgcgacgatgacttctttgagctgttcgaggttcatgatgatgttctccttgcatgtgatgctttcattgtatcaaagacctgagatttgtcaagtcccggaagccgccggccaatgctcggcgcgataggcttcatattgttcgagcttctcgttccaagcggcataggccgcgtcggttcgatgatccgtcagctcatagcgttcactgagccacgcgccgaggaatgcggtcagctttgttgcgccgtccgggttcatgtggccgagataatcatagcagtccgtcgtgaaatcgatgcccgtggcctcgtcaaacaggttgaggaaggggacgcctaattcgtcggcgagcagctgcgcgcggttcatctccatctgctcttcctcggaaaccggcgcgggcaaggccatcaggacaggctcgatgccgtttgatctgcatgtatcgatgatccgtctgagcgccgcttcgccgggcagttcatcggcagcgacgtcgtgcgtgcgggtatacgggagcgggtcgccgtggccgacgcgcatttcgctgcccatcatgaaaggttcgcaatccaccagccgggcgctttggccggaaagcagctcttcccaacggctgtgataaagcgagaaaggcatcataaattcaagccattcgcctttgggcaggatggcgcgcacggcgtcaaacttggccggagacagcggcaccgcgtcgaaaaacaggtggcggtagctgtacgtccattccagatcgtccggtttatcgatgtaatatacgtcgatgaccgcgactttcggcttatgcgtttggatgcacagcttcaaaatctgttcggtcatgcccagcgtttcggaggacgtcgccatgttataagcggaaatgccgtagtcgcgccaaagctccatcggggttacgccgtcgagtacgtggctcgtgcccatgaaaaacacgtcgatgtcctgcttttcggaaaagaacgacccgaatttgcgctccgcgtcgtcgcgccgggttgcacggtcgcagagaagcaggccgccgacgacggcgaggaggagcagaacgacggaaagaatgcgtttcatagataccctttctgaattaaaacgggatcacgtcgggactccgtcccaaaccaagaacctcagactcctgccgcggcgcgggaagagtcccgcacgtatccccttaaaactggaaatagatgaacgcctgcgcgctgtaccccggcccccaaatgccaaagacggcaatcgccagaatggccagcacgtagagcgcgccgcgcgccaaaaggggcaggcggtcggtgagctgggtcagcgttttgcgcttttcatgcagcagttcgatggcaaacagaatcgccatgcagacgcccaggcagagcgcctgcatgccggagaaacccgttgccagagcgggcgcgcgccacgctgtcggaatgcgccagagcatgcccagtgctgcactcatcgaggtcgcgcggaaaatcagcatcgtgatgagaatcaaaaaatccgtccacaacacgttggcgacatgatgcagcttgaccagccgtttggggcgcttctgcggcagaatgccctcgacgacctgcaaagcaccgttcagcatgccccacgcgacatatttgagcgctgcgccgtgccataaaccgctgagcgtgtaaaccgccatcacgttgaatgccttgcgcttttcgcccctgcgtcccgcaccgagcggcacataaacgtaatcgcggaaccacgagctgaggctgatgtgccagcgcgcccagaaattggtgaccgagtgcgcgaaatacggctggcggaagttggtcatcagctctacgcccagcaccttggccgtgccgatggcgatgtagctgtatcccgcaaagtcacagagatcctgcacggcgaatacggcggtcgccagcgcaatctgcgcgccggaagattcgacccagttgccgaaaatcgcgttgacgtagatcgcggcgcggtcggcgataacgaccttttcaaagaaacccagcagcataatcagcaggccgtcgcgcgcacgcctgaaatcgaaatcatgcggttcggcgagctgcctgagcaaacggttgctgcgctcaatcgggccggccaccagctggggaaagaacgagatgaacagcgcatagcggaaaagattggtttcggccttcgtccggcccttgtagacgtcgatcatgtagcccagcgcctggaaggtgaagaagctgatgcccaccggcagcagaatatccacctgcggcagacgcagcgcaaagcccaatgcgccgcacacgcggttcagaacgtcgatgaacatgccggtatatttgaaatagccgagcatgccgaggttgaagacgatgccgccgacgagcaccgctttgcgcgccttcggctttgtaatgcgggaaaccgccagcgcgcagatgtaggtgacgagggtgcttgcggccatcagcagcgcgtattccgcgtgccaattcatatagaagtaatagctgctcaccagcagccagacccagcggattttcctcggcagaacgaagtaaagcagcgtgacgaccgggaagaagatcaaatacgaaaacgaattgaatatcatgcgttcacctttgaaaaacaaaatgcaaaatccatatgattataacgtaaaaaccggacgatggctagtcccgaaatcacgctttccggggtttggcggaaatcaccgccgccacgatgccgcagcagatcatcagcgcgccgataacgaagccgggtgtgacggcttcgtgcagaaacagaacgcccaaaatcgaagagacgagcggctgcatggggtagaacatggagcagaagctcgcgtccatcacgcggagactgtaattccagagggaatgggtgacggcggtgccgagcacacccatgtagagcacggcgagcacgctttcgagcgtgaaagagcagggggcgctttgcagctcgatgagcgaccagcccccggtaaacggcagcgcgcagaggatggcgatcagcgcgatctgcatgggatcgtatcgcccgctgacgcgccggatgatgatagaagcggtagaccagagaaagacgctggcgagcatcagcagcgcgccggatgcgtctaccgtgccgtccacgccgacgatgacgaccacgccggccatcgacaacgccacgcaggcaattttggcgggcgtaatgcgctcgtgcaggaagaaagcggccagaatcggaatgaagatggggttcatcgcgcccagcagggaggagaccgaaccggtcagccggttgatgcccagcatttgcaggcagaaactcgcgaaataccccgtaaagccgatggcaaagagaatcggccagtcgcctttttttatgggggtcagcgcatgacgcaggcgcagcacgatgaaaagcgcgggaacggagaccagatatcgaagcgccagcagcgtcaccggcgggacggtgcgcagcgcaattttggaaataacgtattggctgccccaaagcacaaaggcggcgaacaggggaatcagacggcgcttattcatacggagccctcgcttcttcgtttaaagggaacggcgcaggatttcatccgcgcgtcggaaaaaatctgttttccatcctattataaaagaaaaaagcgccgttgtatagcttaaaatgcctgaatgccgccgaaagcccgtgagaacagacgaatttgcaagctccatcaaaaaacactgttttttggtgaaaataggcaatgaattgcaactgactgcaaaaagaaaattaaaaagtgaaaaacattcatctgaaaagtgaagaaaactgaaagaatccgcttgttttgcgtgaacgattgctgtataataccacctatcaacggcgaggacaacaaaagcccccgctgaaatctcttacatcctgtatagggggaattggattatgaagaagatgcttgctgcggctgtggccgccgtgatgacgatgagcgcgtctatggcaatggccgacggcgcgatcaagatcggcgaaatcggcccgctgaccggcgccgccgccatttacggcacggccgtcgccaacggcgcgcagatcgccatcgacgagctgaacgcgcggggcggtcagcagtatgagttgaacgcgcaggacgacgaggcagacgcggagaagtccgtcaacgcctacaacaacctgcttgactggggcgcgcagatgatgctggcgaccgtcaccaccaacccctgcattgccgtcggcgcgcaggcgtatgaggaccgcgtgttcatgctgacgccgtccgcttcttccgcggacgtcaccgccgacaaggacaatgtgtatcaggtttgcttcaccgatccggcgcagggcaccgcttccgctcagtatatctccgagcataacctggctactaaggttgccgtgatttacaacaacgccgacgcatattccaccggcatctatcagaccttcgacgcgaaggccaaggagctgggtcttgatatcgtcgccgtgtctaccttcactgatgacaccaccgatttctccgtgcaggtgactgccgcgaaggaagcgggcgccgatctcgtgttcctgccgatttattacaccccggcttccatgatcctcatgcaggccaacacgatgggctatgcgccgatcttcttcggctgcgacggcatggacggcatcctcgccatcgagggctttgacaccagcctggccgagggtctgatgatgctgacgccgttcgccgcggacgctcaggacgagaagaccgtgtctttcgtcaccaagtatcaggagcagttcggcggcgtgccgaaccagttcgctgcggatgcgtatgacggcatctacgcgctggccgctgcctgcgagaaggcgggcgtgaccgccgatacctctgttgaggatgcctgcgacatggtcatcgccgccatgcaggagattcaggtggagggcctgaccggtaccatgacttgggacgccaccggctctgtcaccaagaccccgactgccgttgtcatcaaggatggcgcttacgtcagcgcggagtaaataagcaatctcagcgtacatggtttcggtcagccggagccatgtacttttgttgtatcaggggggaggaacgatcgggactccgtcccgaaccctgccagattgattgctgtgcaatcaaaacatactgtccgtagccatataattctctcctcatttatcgcgcagcgataaatgataggggaaatccaagaacctcaggttcttggtggggtctggggcaaagccccaataacacccccaacgttctcccccgctttttcaatctccccctactcaagcaaatgaggtgaatgaaatgacattgtttctttcctacctgatcaacggcatcagcttgggaagcgtttacgccatcatcgcgctgggttatacgatggtgtacggcatcgctaaaatgctcaactttgcgcatggcgacgtcatcatgatcggcgcgtatgtctccttctgcgccatgcagtacctcggcttgcccgcgctcgtctccgttgtgcttgcgatggtcgcgtgtaccgcgctgggcattgtgatcgagggcttggcctataagccgctgcgccaggcgccgtcgctggccgtgctgatcaccgccatcggcgtgagctacttcctccaaaacagcgcgctgctcatctggggttccgcgccgaagagctatccgtccgtgatcaccctcggctccatcaacctgatggatggccagctcgtcatctccggcggcaccatcgtcaccgtgctcgccaatatcgtcatcatggtggcgctcaccttgtttaccggccgaaccaagttcggcaaggccatgcgcgcagtctccgaagataagggcgcggcggaactgatgggcattaacgtcaacgcgacgatctccatgactttcgccatcggctcggcgctggccgccgttgcgggcgtgctgctctgctccgcttatccgacgctccagccgacgaccggctccatgccgggcattaaggcgtttacggcggctgtattcggcggcatcggctccattccgggcgcgatgatcggcggcgtgctgctgggcgtgatcgagattctcggcaaggcctatgtctccaccgagctgggcgacgcgcttgtgttcgccgtgctcatcctcgtgctgctcgtcaagccgaccggcctgctgggcaagcccgtgcgcgagaaagtgtgaggtgaaatccatgagaagcaaaaaattccgcagcaccctgatcacgttcggcatagtcgtcgcggcgtttatcgcctgccaggtgatgatttccaccggcgcgatgacccgctcgctcaaaggtcagcttgtgccgatctgcgcgtatatcgtcatggctgtttcgctgaacctgacggtcggcatttccggcgaactgagcctcggtcacgcgggctttatgagcgtcggcgcgttctccggcatcgtgatggccatgtggctgagcaagggtgtgggactggccaacgaaaccgtctgcctgctgctggcgattctgactggcggcgtggcggcaggcattgcgggcgtgctgatcggcattccggtgctgcgtctgcgcggcgactacctcgccatcgttacgctggcgttcggcgagatcatccgcaatgtcatcaactgcctgtatatctccctggacggcagcgcgctgcatatcgcgttcaataacccgaacgtgccgggcaagctgatggtcaacggccccgcgggcgcgacgggcgtgaccaaaatcgcgacgttcggcatgggctttgtgcttgtgctgttcacgctgttcgtggtgctcaacctgattgacagccgttccggccgtgcgatcatggccatccgcgacaaccgcattgcggcggaagcgatgggcctgaatgtgacgaagtacaagatgatggcgtttgtcacctccgccgtgctggcgggcatggcgggcgcgctctacggcctgaatttctccaccgtcgccgcgtccaagttcaagtttgatacgtccatcctcgtgctggtgttcgtcgtgctcggcggcatcggcaacatccgcggctcgatcatctccgcgacgctgctcaccatcctgcctgagctgctgcgcgcgtttgcgaattaccgcatgctcatctatgccatcgtgctgattctggtcatgctggccacgaacaacccgacgctgcgcagtctggtgcagcgcatcatcccgcataagaaggggcagaagaaggaggctgacgaggcatgacggagacgaagaagcgcgccgcgaccaggatggttccggcgcccagccacggcatcatccccgaacgcgattttcatgagcgccccgtgctggaggcgcgcaacctgggcatcgatttcggcggcctgcatgccgttgaggatttcaacctgattatcggcaagacggaaatcgccggcctgatcggcccgaacggcgcgggcaagaccaccgtcttcaacctgctgactaaggtgtatcagccgacgatgggcacgattctgctcaatggccgcgatactgcgggcatgaacaccgcgcaggccaacaagctgggtatcgcgcgcacgttccagaatatccgcctgtttgataacatgtccgtcgaggacaacgtgcgcatcggcctgcacaatcaggtgcggtacggcatgttctccgggattttccgcatgccaggctattggcgcggcgagcgcgaaatgcacgagcgcgcgctcgatctgctgagcattttcgatatgcaggatctggcgaaccatcaggcgggcagcctgccttatggcgcgcagcgccgactggaaatcgtccgcgcgctggcgaccaacccgtcgctgctgctgctggacgaaccggcggcgggtatgaatccgcatgagaccgaagagctgatggaaaacatcaccaagatccgcgatcagttccacatcgccatcctgctcatcgagcacgacatgagcctggtcatgggcatctgcgaaggcatctgcgtgctcaattacggcaagatcatcgccaagggcacggcggaggaaattcagaataacccggtggtcatcgaggcctatctgggcaaacggaaggagcagtgagccatgagcatgctgaaggttgaagggcttaacgtctattacggcagcattcatgccatcaaaggcgtctccttcgaggtcaatcagggagaaattgtcacgatgatcggcgcgaacggcgcgggcaagtccaccacgatgaataccgtcgcgggtctgctcaagcctaagagcggcagcatcacctttgagggccacgacgtcactaccacgcccgcgaacaaagtcgtttcgctcggccttgcgctctgcccggagggccggcgcgtcttccagcagatgagcgtgcgcgagaaccttgagatgggcggctatacgcgcccggcaggcgaaatcgccgcgtcgctggatcaggtgttcgagcagtttccgcgcctgaaagagcgccagcgccagatttccggcacgctctccggcggcgaacaacagatgctcgccatgggccgcgcgctgatgagcaagccgaagctgctgatgcttgacgaaccgtccatgggtctggctccgattctggtggaacagatttttgagatcatcctgaaactcaatcagaccggcacgacgattctgctggttgagcagaacgcgcagatggcgctttccatcgccaaccgcgcctatgtgctggaaaccggccacattgtcaaggaaggcagcgccgacacgctcatgcacgacgacgcggtgcgcaaggcgtatctgggataaagacatcacattgcacgatcctttcctgtcggggagaggatcgtttttttctttgcagagcagcttgaacgaacgtgcgttttggagtacagtaaatagagaaggaggggacgagtttgaaacgcgaaatggatcaaaagtcgcccaacgtgacgcgcggacaggcggcagagtatttcggactttctaaaaatgcgctgcgcaactacgaaatgatgtgcctggtcgatccgcaagtgggcgaaaacggctatcgatattatcacgaagaagatatttccgcgctttcgacgattcggatgtatcgtgacatgggctacacgctcgaaagcattcagcagctgatgagaagcccttcgctccagaacctgagcgagctgtttgacgagcatcaaaaggagctgttcgccatgcaggaggaattgattcggcagacacgcaagtgctgcgccatgaacacgcggttgggcaaagcggcgcgcgcccccttggttgaggaaagccgggaaacagtcgagctgctgtggaagccgagaatcgacgagccgggccaaatcggagacgaaacggataaacagtggctgaccgctttcccggacgtcagtatttcgggcattctggattttgagcaggggcagctgacccgcattgaa

SEQ ID NO: 1160 - DNA, 7216 bp, unidentified
  source 1..7216: mol_type = unassigned DNA
ctaatccttaatcccttgtttcaagtattcgtaaaagctatattgcgaccgtaccttctccttttgcggtcgcgacgacttccagcggtttcgcaaccggtcgtccacaaagcaggctttccgtttgtccgacagttgtatggatagcatatcgatgagctcttgcttcaagtccgggtccagaatgggggtgacggcttcgatacggcggtacaagttacgccgcatccaatccggcgagccgaggaagagcttgggtgcgccgccgttgccgaagtaccacacacgggcatgttccagaaaggtatccacgatgcgtgtcacgcggatgttgtggctgtactcctgcccggggatgaggcagcagatgccgcggacaatgaggtctatctctacaccggcttgcgaggcttcgtagaggcggtctatcatggcagggtcttgcagggcattcatttttaggataatccgtccttgcttgccttgccgagccagttctatttcgtgattgatgaggcggttcagttcaggaatcaggttgaagcgggccacaagcaggcggtggaacactggattttcctttccctgcagagtacggaacaagttgtgcaggtcgtttacaatcaccgggttgcaggtgaatagtccgctgtccgcatagagggtggcggtcttttcgttgaagttgccggtgctgatgtaggcgtagcttgtcagtttgcgcccttccttgtcgcggcgtagcacgagggctactttggcatgtacctttagtcctggtatgctgaaaatgatgttgatgccggcggctttcatcatctcggcggtggcgaggttgttttcttcgtcgaagcgggctttcagttccacaaagacggtgactttctttccggtctgtgcggcggctatcagggtgttgatgacggtggagttctctgccacgcgatactgggtcaccatgatttcacgcacggtgggttcgtggacggcttcatatagaaaatggatgaagtggtcgaaggagtggtagggataatgcagcagcaggtccttcttctccacatagcggaagatggattcgcgttcgtccaggcaggtcagcttcatgggctggggtttcttgatgggacgtacgctttggttgggattaggcagatgccgcaaatcctccatgttgaggtgcttgtctcccggcaccagctcccggcggtctatgcggtaggcatctaccagaaagtcgaggaagtcctggggcatggcgcggtcgtatacaaaacggcacacggcgcctatcttgcgtttctttaccttcttcttcacctgctcgatgatttcggaggtattggcggcatcgtctatcagaatatccgcatcgcgtgaaatcttgatgcaataactgctgtccacttcataaccggggaagatggtatccagattggccttgatgatgtcttcaatgaacatcagataatagtctttccccaccttgggcagctggatgaagcgcggcactttgctgtacggcagtttcatcacgaaatactggatgcggtttggagaactggcgggagctcctttcagatgaagccgtacggctagatagagacggttgtcgcgcaggaatgaaatcaccttgtccttgcttacgggcaccggggccagataggggaatatctcttcgcggaagaagctgcgcacaaagtcgcggtgaaacggttctacgttgcggctttgatagaatatgatgtgatgtttccgcagggcgggcagtatcttctgttcgtagatgcggatacgttcctccagttggcgattgacttcttggttgatttcatctaccagttcggcggcagactgcatagtctcttcatcgctttgcgaggctccggtggctatggccttatggtcggctacgcgtatcttgtagaattcttccagattggaagagtatatagaaataaagttgatgcgttcgtatagcggcaatgtctcgtcttccgcttccagcagtacgcggtagttgaaggaaagccagctgatgtcacgtttgaaatatctgttgtccatggtgttaaggtgttaatgtggcatattagcacattaccacattgtattcttcccaaatataattacctttgtcttaataaacaaaggaaagatgacaaaagttggtttattatcggatacgcatggctactgggatgaaaagtacctgcaatattttgagggctgtgacgaaatatggcatgccggtgacatcggttcgctggaagtggcacagaagctggcggctttccgtcccttccgtgccgtgtatggcaatattgacgggcaggagatacggcagctctatccgcagattctccgtttcacggtggatggggcggaggtgctgatgaagcatatcggcggttatcccggcaactacgacccttccatcaagggcagcattctggtgcgtcccccaaagctgttcatcagcgggcactcgcatatactgaaggtgaagtatgacaagacgttggatgtactccacatcaatccgggcgctgcgggcattcaaggtttccataaggtgcgtacgatggtacgctttgcggttgatgggggaacgtttaaagatttggaggtgatagaacttgctgaccgatgatgtagtttgtttattttcaatggattgtatttaccgattgtttacgctgtagtgtaaaagccgttacatgctaatgtaaaggtcgttacgctattgggtaaaggccgttacactatttggtaaaggtcgttacacgctgaggtgaagaccgtttcatcaaggggtgacggccgttacgcactgaagtaagcaaaacaatgtaccggagtaagcaaagcaatgaagtaaaaagatgaaaccaagccttcacttaatcgaatttttccattatctttgtacccgaatagcaagtagagccgtggggcatcgtcctccttcttattttattctccattttgaagtatcaccgaaaaagaactgaaatatgaaaggaattattcttgcaggtggcagtgccactcgtctctatccgttgtccaaggctatctccaagcagataatgcccgtctacgacaagccgatgatatactacccgctctctacactgatgttggcgggaattcgcgaagtgcttattatctctactccacgtgacttacccatgttccgcgagctgctgggaaccggcgaagaactcggtatgtccttttcctataagatacaagagaatcccaacggactggcacaagcctttgtgctgggtgcagagttcttggacggcggaccgggctgccttattctgggcgacaacatgttctacggtcaaggcttctccgccatgctgaagcgtgccgcttccatagacaagggtgcctgcatctttggttattacgtcaaggacccccgtgcctacggtgtagtggagtttgatgccaacggcaaagccgtctcgctggaagaaaagcctgccaatcctaaaagcaactatgccgtccccggactgtacttctacgactccaccgtgacagagaaagccgcctccttgaagccctctgctcgcggagaatacgaaattaccgacctcaaccgtctctatctggacgagggcacactgaaagtggagctcttcggccgtggctttgcctggctcgacaccggcaattgcgacagcctgctggaagccagcaattttgtcgccaccatccagaaccgtcaaggcttccgcgtgagctgtatcgaagagattgcctggcgcaagggctggatagatgtagaccagctgtatcgcttgggtgaacagcttggcaagaccgaatatggcaaatacctgatggaactggctgaatcgaagcgatgaactctttgttccccaaaaagagaaggagaatagttctcctataaaggcccgctgactttaatttttaatttataatttttaattctcatgaagacttatctcgtaaccggtgccgccggttttatcggcgccaactatattaaatatatcctggcaaaacataatgatattaaagtggtgatactggatgccttgacctacgcaggcaatctgggcaccattgccaatgacattgacgatgaacgttgcttttttgtaaaaggtgacatctgcgaccgcgtgcttgccgacgaactgtttgccaagtataaattcgattacgtagtgaattttgctgccgagagccacgtagaccgtagcatagagaatccccagcttttcctgatgaccaacatcctgggtacacaaaacctgctcgacgccgcccgccgtgcctgggtcacgggcaaggacgagtccggttatcccacttggcgcaaaggcgttcgttaccatcaagtgtctaccgacgaagtttacggctcacttggtgccgaaggctacttcacagagcaaaccccgctctgcccgcacagcccttacagcgccagcaagacgagtgccgatatggtagtgatggcctatcacgatacctataagatgcccgtcactatcacccgctgttccaacaactacggtccttatcacttccccgaaaagctgattccgcttatcatcaagaatattctcgaaggcaagaacctccccgtctatggcgacggcagtaacgtgcgtgactggctctacgtggaagaccactgcaaagctatcgacctggttgtccgcgagggtgtggaaggcgaagtctacaacgtaggcggtcacaacgaaaagaccaatcttgaaatcgtgaagctgactattgccaccgtccgccgcttgatggaggaagaaccccgttaccgtgcagtgctgaagaaacaagtaaaagccgccgacggcacgattgacatcagctggataaacgaagaccttatcaccttcgtcaaagaccgcctaggtcacgaccagcgttatgccatcgactccacaaagattaccaatgccctgggctggtatccggagacgaagttcgaggtcggcatcgtcaagaccattgaatggtacctgaacaaccagccgtgggtggaagaagtgaccagcggtgattatcagaagtattacgaacagatgtatggaggtagaggttaaggtttagggattagggtctaaccgctaatccttaacctctaacctctcaattcagcgccaccgctaacagtaatcctaagaacagcatattgcgcgacgtctcgcccagtatgctgttcagctttttaccgctacctatctgtatcattttgcgccacgtcagtgcgtgcatatagagatagacgcagggagcccagataaattccagcggagtcagcttgcccgtgtagacaaaccagaagcagagcagcacggcggcgatgcccagtgccagatacatattctcaccgaacttcttgccgtagcgtaccaccagcgtacacttgccgctcacggcatcctgctcgcggtcgcgatagttgttcaccatcagcaaggtgtctatggcgaggccactgacgagcgacagcaccaccacatccatattcagcgtataggcctgcacgtagtaggtgccgcatacgggcacgaagccgaagaacaccagcaccagtacgtcgccccagccccgataggagagcagcgtggtatagaggaaagcaaacagtatgcacaccacgcccagcaccaccagttcccagcctccgtggggcagctgcccccagacggtgaacagcactgccagccctgccaggcacgacagtgtcagtgcgatgccgatgccggttttcatggctgccggcgtaatccaaccttcggcgcaggcgcgctgcggccccagccggtcttcccgacggtcggtccctttctggaagtcgaagaggtcgttgataaagttggcggcaatctgcatgccgcaggcaaagagggcgcacagcagggcgggtgcggtcttgaactgtccgtcgctgaaggcaagggcactgcccagcaataccgggatgatggctcccgtcaacgtcttggggcgggcggcgagaaaccatgcgtagggtgaattctgtttaatctcgttcatcgtagttccaatttagttcggcatctgccagcaaaaatactgaaaatccctatatttgtacccacttatgatgaagaagttagtctacatatccattctttctctgctgctcttgtcttcctgccgttccaagcggatgattaccgtgtcgttgccgcagccagtcatgcaggcagacagcacgcagcttggcgatactatcgggttgcctgcccgcctttcgccgatgttcacctttgaccagtctgatttgcgtaatgtccgccgccagccggcgaagggcgaggtaaagaaacagcagataaagaaaacggcaccggtacaaaaggtaattgtgcagcgaggtacaagaatcacatcgaaaaccacccacgtaggctcggcctataagggcgtcagccgcattaagacgtacgacttcacgcatcgcgacgtgcctgccgccttcgagggcttccgcatcgcctttgtctccgacctgcactacaaaagcctgctgaaggaggagggattgaaggacctggtccgcctgctcatagaccagaaggccgacgtgctgctgattggcggtgactttcacgaaggctgccagtacgtgccacccgtcatggctgccctggcgcaagtgaagacgccgttgggcacctatgccgtgcttggcaacaatgactacgaggcttgctatgacgacatcgtgcgcgaaatgaggcattatggcatgcatctgctggagcataaggtggacaccctgcggcgtggcggtgagcggattcttgtggcgggcgtgcgcaatcctttcgacttgggcaagaacggcacatcgcccacactcggcctttcgcccgacgatttcgtaatcctgctgacgcatacgccagactatgccgaggacgtcccggtgacaaactccgatctcatcctggccggacacacgcatggcgggcaggtgacgctgttcgggctttatgcaccgatagtcccctcgcactacgggcagcggttcctctccgggctgaagtacaactcaaagaacatcccgatgattgtcaccaacggcatcggcacttcgcagaaagccatccgcatgtttgctcccgcagaggtggtgatgattgtgctgcaccggctgacggactga

SEQ ID NO: 1161 - DNA, 27504 bp, unidentified
  source 1..27504: mol_type = unassigned DNA
ccattcaccagatactcatgtacggctttgaaaccttccttgccgtagtaatcgtctgcattgatgacgataaacggagtcttgatgaccttcttcgctgcaagcacagcctgaccggttccccacggctttgtccggccttctggcaaagttcccgggatatcgttaatatcctggaaagcatagtcaacagttacattatgagaagagcaaatggaggcaatgcgatcaccgatgacctctttgaactccttctcgatatccttacggatgataaatactacatggttgaaaccagcttcaatcgcatcatggattgagtagtccataatgatatgtccagcatcatccaccggctccaactgtttaattcctgttccaaagcggctaccgataccagcagccatgataagtaatgttgttttcataacttcttcctcttactaacttttattctactgtcacactcttcgccagatttcttggcttatccacatccaggcccttggctacagacacatagtagccaagtagctgcaacggaatcactgccagactaccaacaaagtgctcgtccacctttggaacataaactgtgaagtttacctgatcttcgatttcatacttgccataagtagtgagccccatcagataagcaccacggctcttgcactccaacatattgctgatagttttttcatagagttcgctctgggtcagcacgccgatgaccaatgttccctgctcaatcagactaatagttccgtgcttcagttcgccagcagcgtatgcctccgagtgaatgtagctgatttctttcagtttcaaactaccttccaagcagacagcatagtcaatgccacggcctacgaagaacacatcatgtgcattggcatactttgctgcaaaccactggatgcgctccttatcttccagagtcttctgcatcttctccggaagcgttaacaattcagagataaagtagctgtattgttcctccgtgattttttctctaacttttgcaaactgaaccgccagacagtacatggctgtcagctgtgcgctgtatgccttagtcgttgcgacagagatttctggaccagcaagggtgtagaacactttgtccgcttcacgggcaatactgctgcctaccacattgacgattgccattgtggttatgcctttttcttttgcaagtcgcagtgcagccaatgtatctgctgtctcgccagactggctgacaacgattacaagtgccttctgattgagcggcatcttccgatagcggaactcggatgcgagttccacacgcaccgggatttctgccatatcttccagcacatactgagcagccatgcccacatgccatgcagaaccacaggcaacaatatagatctgctcaaagtttttaatttcgtcctcggtgatttccacactggataggtcgatagcgctgttcttgatcacagaattaagggtatcctgaacagctttcggctgctcatggatttctttcatcatgaaatgctcaaagccgcctttttcggcagcctcggcatcccacttgatttcagtggtctgcttctcgatctcatcaccgttcaagtcatagaaatgagcttcacccggagtcaactttgcgaactcaaggttgccaatgtaatacacgttgcgagtgtatttcagaattgccgggacatccgaagccacataggtttctccgtctgcaatgccgatgatcatcgggctgtctttacgagccacccagatttcgcctggataatcacggaacatcagctcaagagcgtaagaaccacggacacgcaccatcgtcttagcaatggcatcaataggaccgaggttgtactttttataataatagtccaccagcttgatgaccacttccgtatccgtctgactatagaatgtataaccgtgcttcagcagcttttctttcagttcggtatagttttcaatgatgccgttatgtacgccaacgactccagactccactgtaccagaaccagaacgggtacagttacctgaaacatgcggatgtgcattggtttggctcggctcaccatgagttgcccaacgagtatgaccaataccacaggttcctttcaatgccttgccgccatctgttttctcgatcagattggacaggcgccccttcgctttcacgacctgtgccagattttctccgtcacggacagccagtccggccgagtcatatcctctatattctagttttgacagaccatccagcaggatcggtgctgcctgtcgatttccagtaaaaccaacgattccacacataggtttatccctcccgttatttaatctattatactttcccttttatgcaaaacgactccggaaactgccagagtcgtcattgactttatgccttatatcccttttcgcagattacattgaccacttcatcaacatacttctggcaggtattatggtcaggtgcttccaccataacacgaacgaccggttcagtgccggattcacgcatcagaatacggccggtatcgcccagagcctcagcaactttagacactgcttcctgcacggcaggatcattctgcgcggtcttcttatcggtaacacggacattttccagcacctgcgggtagatcttcagcggctcagccagcttgctcatgggcagctttttggccagcatgacttccatcatcttcagactagtcagaataccatcacccgtgctggcgtacttgctgaagataatatgaccactctgctcaccgccgatacggcagccgttcttggccatgtactcatagacgtacttgtcgcccacagcggtcttggcgtagccgatgcccttctcatcaaaagccttatacaggccaaagttggacatgaccgtggtaacaacagtattggtcagcagtttgccacgctccttcatgtagcaaccgtagatgtacaggatgtggtcgccagtgatgacattacccttttcatccacacacaggcagcggtcagcatcgccgtcataggcgaaaccaatatccagacccttctccaccacaaacttctgtaagccctcgatgtgggtggagccggcgttgttgttgatgttcagaccgttgggctgtgcattgatgacataggtatcagctcccagagcatcgaacacagatttagcgatgttccaggaactaccgttagcgcaatccagaccaaccttgacgcccttgaaggagtagatgcccagagaaatcaggtagcccatataacggttgcggcctgcaacgtagtccacagtacagccgatatgctcacgatgggcaaagggcagctccggccaatccttatcgaacacatgaagtttgccgtcgatgtagtcctctaccagcagcagagtctcctcgggcattttttcaccgtaacagtctatcagcttgatgccgttatcgtagtaggggttatggcttgcagagatcatgatgccgcaatcgaagtcatccacgcgggcgatgtaggccacggacggcgtggtagtgacatgcagcaggtaggcttctgcaccggaagcggccagacctgcgaccaggctgtactcgaacatataagagctgcggcgggtgtccttgccgattacaatgcgtgcaggctcgttgttgccgttgcgctcgcgcagagcgttgtaataccagcccagaaaacggccaaccttgtaggcgtgatctgcggtcagagtgattccagcttcaccacggaagccatcggttccaaaatactttcccattatagttttttccttatccaaagagtgatttaacgaatatatgctttagccggattataatccgttgcctgctgctcaccacggagaggtagcatacttgagcagcacagccatgtggcttaacacatggccgatgtgcggaatcagtacttcctccacaccatcttattaactacgtttacatacccctgaataatacgaaccaccttcatggatacggtctcatccacatagtcaggacagggcttgcccagaacgcccttctgcttcatttcaatcgccatatcggtggcattgagcagctcccgggtggtaatgccagccagaataaagtcaccggcctccagcgcctcgggacgttccgtgctggtgcggatgcacacggcggcgatgggatgaccgatggacagatagaagctagactcctcgggcagcgtgccggagtcggagacgattgccagagcgttcatttgcagcttgttatagtcgttgaagcccagcggctcgttgacccggacacgagggtcgagttggaagccgctcttttccagacggcgcttgctgcggggatgacaggagtacaggatgggcatatcatacttctctgccagtgcgttaatggcggtgaacaggctcaggaagttcttttccgagtcgatgttctcctcccggtgggcggacagcagaatgtacttgttcttttccagccccagacgctccagcacgtcgcttttctgaatcttttccagattcatgtgcagcacttccgccatgggagaaccggtctggtaggtacgttccttgggcaggccggtatctgccagatacttccgggcaaactcggagtagcacatatttacgtcagagatcacgtccacgatgcggcggttggtctcctcgggcaggcactcatccttgcagcggttgcctgcctccatgtgaaacagcgggatgtgcagccgcttggcactgatggcggacaggcaggagttggtatcgcccagcaccagatatccctccggctgcaactcggacagaagctcatagctgcgacccagaatgttaccgcaggtcacgcccagattctcgccaaccaccggaaccagaatatccggaccatactccccgaaggtgttcttcagctcaaaatcctcccagaaaacagtggaaaggtttctgtcccagttctgattgtaatagaccacgcagcagtcaaaatattcccggcagcgcttgataacggcagccagccgaataatctccggacgggtgccacagccaatcatgactttggtgcgcccgtcgtttttccatgtaaaattgtgttccataaaattctcctaacgtcaaccagtatcttctcttataccggctcgaaaaaggtgtccgggtggttcgggttaaagatctcgttacaggtcatcaccgtcacaagattctccgtttccgacagattgatgatgttgtgggtccagccgggaatcatgtggacagcctcgatcttgtccccggaaacctcaaactccaccgtttcgccggtgttgatgtttcgctcctgaatcaaaccgtgaccagcgaccacaatgaacagctcccacttggagttgtgccagtgctgccccttggtaatgcccggacggctgatgttgatgctcacctgtccgcagtcagcggtgtgtaccagctcggtgaaagaaccacggttgtccacgttcatcttcagggcatacttgaacttgtccgtcggcagataggtcaggtacagggagtagagcttcttggcaaaggagccgtccggcatcttgggcatcatgagggtcgtgggctgtgccttgaactcctgcagaagatccacgatttcgcccagcgtgaccttgtgggtcattggaacgcagcagtagcgaccgtctgctttcagaacagtctccacgccttcaaactcgcagtgctgctccttgccttccagcagatcaaacatcccttccacaagatcgtcgatgtacagcaactccagctcggtgctgcggtcgttgacggtgaaaggctcatcgttggcaaccgcccagcagaaggtactgacggcactgttgtatttagggcggctgtgtcccatcaggttgacgaagcgatagaccgccacctttgccccagttttccgagcatactggaagaacagctcctcgccggcctttttgctgcggccgtactcgctgttgccaaaccgcccagccagcgtagcctgaatggaggaagacaacatgatggttgccttgttattgtactttttcaggcagttcagcaattcggatgcaaagccgaagttgcccttcatgaaatcttccgggttttccggacgattcacgcctgccagattgaacacgaagtctgctttctggcagtattcgtccagctccgccggggtggaatccagatcatactcatagatttctttaatatccaatgccgggcgagtcttgttcttgccgtcccggatatttttcaggttattgcacaaggcagttcccaccatgcccttggcacctgtgactagaatgttcatcctttcacctctttaatgcacagccgtgcagtctgggatgtctgcaccatctgacacggttgcgttattgcaaatagtacagttactgccaatgcgcacacgtttgccgactttcgcatatgtgcgcacgacggaattcgtatagatcaaagcaaagtcatcgaccgagcaatcgtggtgaacctcaacacccgggttcaacagaacgccatttccgaccgtggatccgttttgaacaacagagtcattcaaaaggacacagccccagcccatttttgcatacggactgacatacgcactcgaatggatcaaattcgggaaagcatatcctatcttctccgccgtatcataaatgcgttcacgtacagcattattgccaattgtgacgaccagcaacttgtatgtgtcaaaaagcttcggtaggtcagaaactcgcccgataaccttcacaccgcatatttctgtaccaacttccacgccgtcatcgacgaaagcgcagtcgtatttctgtatagccaattcggacgccacgcgcccaaagccgccggcaccaatcagcagcaatctttctttagacattcgggatgcctttcagttcgttctggacatattccgtggtcaggattttcttcacagtgccctcgacatccagacgagtggtgttgtggctggtgtaggactcgtccgccatggtatgtacttcgcccttgaccacaaacttgtcgtagttcaggtcacgattatcggcggctacgcggaagtagtgacccatatcctgactgcgcagacgctcctcacgagtcatcaaggtctcgaacagcttctcaccgtggcgagtgccgatgatgttcgtgccggtatcgccgaacagctgctggacggcctttgccaaatcgccgatggtggaagcatcagacttctggatgaacaaatcaccgggatttgcatgttggaaagcgaacaaaaccagatccacagcctcgtccaggttcatcaggaagcgggtcatgttggggtcggtgatggtgataggattgccagccttgatctggtcaatgaacagaggaatgacagagccacggctgcacatgacgttgccgtaacgggtgcagcagatggtagtgccaccacgctcggcagccacacgggcgttagcgtagatgacgtgctccatcatcgccttggagatgcccattgcgttgatgggataagccgccttgtcagtggacaggcagacgacacgcttaacgcctgcgtcgatggcagcgtgcagaacgttgtcagtaccgatgatgttggtctgaacggcctgcatggggaagaactcgcaggacggaacctgcttcagggcagcagcgtggaagatgtagtcaacaccgggcattgcgtcacggatggactgcgggttgcggacatcaccaatgtagaacttgaccttcttggcagtgtcagggtgcttggcctgaagctcatgacgcatatcgtcctgcttcttttcgtcacgggagaagatacggatctccttcaggtcggaatccaggaagtgcttcaaaacagtagaaccgaaagaaccagtaccaccagtgatcataagggttgcgttatcaaatgcagacatttttattttcctcctaatcttttatcaaaaaacattctttaaaagaattgcatcaatcatcagtttgacatttggctgcaagtcttttatgagggccggaaacaaaagaattgtgcttatttgtgttagcaacgatgccaacgcagcaccagatgctccccacaagggaatcatgagcgcattcagcaatacatttgttattgctgctccaacatataaatatttgagatagttctgcttactgtaagaaacgatccatgcatttctggctactccaagataagaaaatgcggtataccatgtaatgattctcaacggagctatagccggggcatatgcgtccccatacaaaatactcataattggagatgctaagagcgaaaagagaagtgaaacgcccacagacacatagaacacaattgcataaagctgcttattcttgcgttcaaacagcttcttattatcgaaagactgcaaaataactgggtacagagaatcaattatcgccgtcagcaaaaacacccatgtattgcacagtgaaactgccgttgaataaaatcccacttccgactcattcaacatttgtttcagcatgaacttatccgtactgccgtaaatcgagaccatcaagccagctaaaatgaagtgatagctactaaagaataattcttttgccttgcgtactgagcacttaaactgagggccgttgtgctttttatacatgacaagaaggacaacagccaccaccatgtagtcgatagaagccgaaatggcaaaccattctacgctttttcctgttgccaacagccacactttataagcggaaacagccgtataggatattaccgtcgcaaaagcagagtatttcgattcaagctttgattgaaaccaatagtccagggtgtccatcacttggaagatcacacctataccgcagaggaacaccacaatgtgcgtcgtagtttctcccttatcagcgatcagcgtgatacacaccatcataagtactgataagacgctggaaaccgttctaaggacaatcgccgatccaacggtttcgccttcctcatcgggataatccacaaaattctttacgataaccgaattgattccaagcgtacagaatgatgcaaagaaggatgtgtatgttgcggcgtaattaatcagtccaaaattgcttggacccaagtatcgtgctgtaagcaatccaacaaagaacgcaagtagcatatgatatacccgcccagcaataatccagcttgcatttcttgtcaccttactgctcagtaaatctcgtattttcatgcctctagactcctaatgactcttgctggaacaccaccaaccaaagtattatccggtacatcatgtaccacacacgcacaagcagctacaacacagccactgcctacagttgaattgttgcagatcgtacttctgcctccaatccatgctccgtttccaatcacctggtgataaatctcgccctgaccggctcttcgggttctatttccaattgcgtgtccgcccgtttgaaacgtaacctctggtccaagatcgcagttgtcgccaatttcgacggtaccatttccattgatcctacagtttttaccaatccagcaattttttccaattgcgatgatgcctttgcattcaatagggccgacaattgtcgttccatctccgactggacacccgattccacggagcaattttcgtttcatattgcaagcaagcggtttcgttccgacaaatacatggttaatcaaaaacaggtttagcgttctcttgataccatttaaatgcagcattcttttaagattcatttgcatgataccatccatcctccaatatttctgcgctactgcagggaccatctttaaacaaattctgcaccgagttgcctttgatgatttccctcgccaattcaacaaatcgaccggatgccacctgtgcgttccacgtatctgaaatcgtggcatacgcattctcgcccgtctttcttctataggcgtcatcgtctaacaatctacagacctgtttttcaaggtgcttttgatttccgttttcgtaaatcagaccatttactccatccttgatcaagaaaggcactgagccaattgcatggcttgcaacaaccgcacatccgctgttcatcgattcatttaagacagctccccacccctcattaaaatcactggtaaaaagaaacacatcagcactttccatatgagcacgtacttcatccggagacattgcgccaagcatttctacgcaatcttctacgcctttgctccgaatcatttcacgaagctgtgcttccatctcaccattgccgataatacttattttaaaggagtagccttttttcttaagagatgctgccaactcgatggaaacatccggatgcttccatcctataagcctgccggcccataggattgaagcctgaggatgcttccatcttgctgacgtagccgatagctttcgcttcatcaattcagcgacatcatatttcttggtctccgggaaatacccccacttaaaggttcttcctttaaaatttgtgtagcgattcaaatccgcagcagtataggcactgctacagcagaaatacaacggtcccttttcaaacggtttcaaatgcttccacgcactcgcaaaattgtgcgggatctgcaacaaccccgttccttccttaaagtagcgctcgctaaacttaaagcacagttttcctttgctcatgcggcgcacaatcagactatccgggcatgagccgtatatcgctacatctgcatcatcaattagtttttcggcctgatgcattttctcctcagaatcgtaggcacaaatcacaaacgggtatttgtgattcatatcctcataccccatgtcaagtctctcttgcggaatcgcttctaatgcaacaaatgtatactccacaccatcttgacttaaaatcccctgtgagaaagggagctgatgatgattcataaaattagaaacgtaagttatcttcatatgttccccctcagtattgtgacaattgacttcggatgattccacaaatcaatagataagaaaacaacagtgcccgacacccagtaagaacaggctcaaaaaagaattgaactgttacagaagccgttattccagtaatcaacactcgattttcaattggtacttttttatttaggatatacttaagattagaaaaagtaatctgtatggtcacaatccatataagaacaaacggaattatcccagccgagtcaaagacatccagccaaagttcatgtgcgtaaaatccaactttacttagcaccttccttccgccccatggataatcaaacattaaggcaatatattgatcccgaacgtttcccctatcgctggatttgaaaaaggaaaataaatcctgtgactgcgctatattcgcatacgatattctgtgaaacagatatgtcgactcaaacattcttgttattgtatcttgatacctaatgtatactactattgctacagcaccaagaacaagagcaattagaattagttttcctatcgccttcatcttttttatgtcatccttttgtccccagatatacacaatcatgctcaaagcaaagctgacacctaccaatgcaaaaaaggttcttccacctaaaatcatgtcatatgcgaaagcaatcactattaacagaatgccagtaatccattttttaactgaattgcttttcataatcagataaaaaatcacacctgcaaaaagtgtcaaatatgttgcagcgcctgttgctgatgtttttgcccccaaactaaaaaaatcataatgcgtcgcttcagaattgattccaccgaaacgaatcaactcgtataggaaattcacaacagcatgacatgtcatgccagtaaccaatagcgttgtcacggatttcaactgcttttctgcttgagatatttccatttgttcattctgcactcgaagcccaatataataagccatggggcatccaattgcggatattcctgcacttaaaccattttgcccggaaaacagaaaaaaagccaccgcaaaaattacaagtacaaaaaacacattatcatttgcaggaatatgcagcttttctctatcataaatcactacaagtataaataccgctgcaagaatcaagctgctttgattaaatatgtttagtgaaaacaggaaaagaagtatatacatcatcctgcttgtaaagttcttttctaaaagcattctttattcctctaaaacatttgcgtacaattcgatgtattctgcaaacctttttttcatatcaaaattttttgaatacgcaacgatatattcctcatcgttgcacctttttttctcgcaaatgtcctttaatgctttctttgtcgcctcgatatcatttgcttctacaacaattcctgttttatcatccaacatttccggacttcctcccgtatcaaacgtcacgacaggtgttccacatgcaatagcttccatattgactgttggataattttcttctcttgtcggcatcacaaacacgtctgctgcactataaatctcagcaagttctttctggttctgcgttctatggattgaaatgatattttgcggcaggttcttgtcgatttcatcatccgttccaactaaaacaattttgaacaaattttcatcgagttcagatgctaagcttataaagcaatccagacctttttttactccccagccaaatgaaactcccaaaataactttctgtccctctttaacgccccacttattcctatattcgttttctgttggcttaaatacatgcaaatcgatgccattgttaataacttttactggatattcatttaaataagattcattcacaagattcgccagccatttagacggagtaacaacagtcaaattttttacccctgtaaaccattttttctttaacttccacattctcattgtattatcatacaatgcttctggatattctttatactgagggcaattaaaacaacctgttctccatttatcacattttgccattgtaaaatgtggacattgcccggtgaacgcccagcaatcatgcagagtccatacaaccggaattttatgcttctttatgtacgaaaaaagcatagggagattgatatacgaatcatgtaaattgtgcagatgaataatatcgggcttaaattcatcaatcttcttcaaaagtttatatgtctcaaaccatgcgaagcacccattgaatcctgtgattctggcaagcgcaacatttaaccgacgactattaaatgttccgattcgataatagccgcagtcctcacctgcattacggttcgttgtggtaataggcgacgcacacattacctcgtgaccctgcgctcttgctacctcggcaatccccatcatgatttttccggtgcttccttttgccccaccgttaatctgcacaatacgcatcactcgtactcctcactgattatcgctaaaaaatgtataccctctgcgcttcatgattgcctttgagagattgaacagcggcttcggaagccactcacgaagccatgtccggaattcaagcatccattcgtctttgggtcgcatatcctctcggtcacctttataaataggattctcatcgaaatacttacgagctttcgtcagcacctttccctttcggatcacgtcaagaataggaaattcaccacgacggctatcagcacagcgagcattcaactgccgtgccatattcgtcaacgcaacctcatactgccaggcattcagcgtttttgtcagtgtcttttccatgaaatccttacgccagatgcccgcatacagactgacaatgtaatcgcctgcatgattgtccagcagaaaaatacccggttccaattcctcagcttttctgtttctcagactcttcatggtcataacaaacagacgcagataatcaatctgatgcttttccatgacctgaacatcttcgttaagcgcttgagtagaaatcttttccgtcaggaaatagtcatccaaggtaaagagaacatactctgtcttaatcagcggcatcactgctctcagacgttccgttatttccgtgccttcgcctgctgccaccactgttacattttcaaaagtacgatcagtgggtttatcggttactaaaaacgtctccacatttcggtctgcccaattctgattcaaaagcaaaatatgtgcatcccacaaatccgaaaacttgtcgcacgtcgaaataataattgaaaagttgttctccatcaccatgtatcctctgccacttatttcatatgttggattgcctttgcaaccacattttctgaggtcttgcagctagcctgcagattatgatgctctcttgtcatcataatcgcctgttcgtagtatttcttttgaatttcctgattagaaatcagctgtgcaatcgaatctaccaatttggctttatccgtacaaaccattgccgcatttgttgactgcatatactcaatgatgccgctttctagcgagccatatgttagaatggatgcgccactcgccaatgcgtccgctgccttcgtagagagtgaataccgtgaaaggttgatgtccttttcctcaaatccctctacaataacagttatatcgctttctgccatgcgcttttgaacttgcgtgtacggcacagagcccatatatttgacattttgattgtccttgaatacagaatagacctgctcgtccttttcgttggaataaacctccagcatatattctggattgatttttccaagagcgtagccaatatcgttcagggagttattgcgtcccatgccgatatttccgaagtaagtaataacaggacaatctttgttaattacgctgaacggtttacgctgaaccgtagaagtcaaataaaccgtttcgccgtccagtccaaattccgaattatacttatcccgaatcttgtcgctaatgtaaatcgcactacccggccaagtcagaaccttgtcaatcaatttcttgtaggtcgatttataaaggtgatagatcggattcagcgtcttttccacattgaaataatagtcatcgccaatgcaggagacaattggcacgttatatctcttggcgacatacattgcaatctgcgggataaaatagtcatccgaaaaagccagaaacacgcattctggtttgaagtcatccagccaattgtttagcttctccgtgcaccaaaatctcttacgccagaggattcccctgagcaaatgcgtaaggggcgtatgctttccaccgaacttgtaggcagctgctgcttttgcatcaccgagttccaaatcattgtctttccactcggtgtcaagatcatcataatgataaattacgccggtatcgactttcttccccatccaccgctgcaacacacggtgatccgtaatttggaaaagcgtctcgcaatgccccttgcacggcttctttgtattggagaatatctgtgcaatattctctttctcccaatagtgaaagtacgcatcaaaagcgcgtgacgttgattttgtgttatatggaaccgttcctacgatcagcactctcggatgcatatcgtttctcctttgaacttttatcgaatatttaatactttcttgagtacggcattttgatcgagcagacggataactactgcacacagccctactgtcagggcgaagtttccggcagtcagtaaataccctccaatactgctaaattggatcgcaacactgcttttgaaaatattgagaagcagaccgtgcatcatgtaaatttccaagcttctctgctttttccatacactacctcttccttagtctttcgatgatttctgcgtcaacatttatgtcaaaccttcttgcgataagtttctccgtcttttttagttcttcgtaatctatagtcgttaatgtcttggggctgctctttcctttttcccacttgatataatgcaagtacggtttagttgtatttgcaaacggcgaattcataaccagggtctgaaaaaagcattcatccggacacagtgaatgtttaaataattttatatattccggataattctccagaaagttatatatccatttcaccattgcatcatttaagcaccaccattgcgacccaaaataatactgaacattagccggttttaatcttttgattattgaaaacgtttgattccatccacctgtactatataccagaatacctttcaaaatcttctgccatattctccttccgataaccattctagggaaataaatatcattccttttttcaaatcgttttatcaatgcgcagtcaatgaaattctcatctttacgctcactaagaaacttcacaatttctccaattgatttaataggaaagtcttgaccgctaattaagaagtaatggctgtacccccccctagaaatggcagcatttagcaaattcaatgttgcttttacttggctaaactgtgcccactgaacatctacgcagtctttctttggaagaagataaacaccatcgttcttctcaatgtcttctctaatattttcgttcttcgaatccacatgaataaaaacgtcaacctgtggatgctttaaagctttcaacagaagattaatctgctttggatttttgtggcactgcattaaaaaggcaaccttcatcatcaatccctcaacactttctcaaacataaacttacgcagccagttgggagccagcgccgacccgctgcggattacgcaactcttaatgtactgaccatttccaataaagccttgctgtttcataaatttgaacaacttggcctgcgtcttggcgtatttccaaccggcccgccgtttatacatatccgagcctgcccgcatatggagcaacggctcttgaatgttatagccctgataccctgccatcagtatccttagccaaaggtaatagtcctccagtaagtagaaatcttgataggagccaactgccttgactgcggacttcttatacatcacgcaggggtgattgaacggattccgcttctttgcaaactctataatttccgcattcgtctccggcggcactcgcctcgtatcaaccgtgttcggatcagtggtaaactcctccacgatgccggagcaaatgctcacttccgaatgtgtgttaaacacagcaatctgtttttcacagcgatctgggtacgcgatgtcatcgctgtccatccgggcaaccaactcatttttgcaatgcttgattccttcattcagcgcattgccaagccccccgtttttcgcaagtcgaacaacattcagattttcgcccatttccagttgcttcgtctgtatcacagcatcaagttcatcatttagcggaccatcacacacaagcacaaagtcattcgtagaaagggattgcacctgaatgctttcgattgcctgctttaaatattccggtctttctttgtgatataccgacatgagaaccgagtattctttgtattcaaaagcactcataaaacggaattcctttccccacagcaacagcccagactcatctccaagagtctgaaccgttattctttcctatctctatccatagctcaatgttttagcttacttttcaatttttagcgctctccggcataaacaggattccttaactacgaaactatataagatagctgctattcaatttcaaatttactttttcaactctcatccaagcttttaatggcaaccggacgagtttgaatcaaactgctacgtcatcatcattttcggatttcttttcagccgcgacagtgacttcgttttccgtcatagtagtcgcttgaccttctgcaacgccttccgttgattccggtaggaacaaaattttgacagtcgcgaacatgatcttaaagtcaacgataatactcggatgggctatatacatgagatccatcacgagcttatcgtatggcgtcgtgttatactttccgtagacctgtgcgtaaccggtaagaccggcctttgcttgtaatcgcagattaaactccggcatttcttcgcaatactgtgctgcaatctccggacgttcgggacgcgggccaacaatgctgaggtcacccttcaaaatattgatgagctgtggcagttcgtcaatgcggcaagcccggataattctaccaactggcgtgatacgatcatctttatcacccgtcgagagtcgcgcaacgccatctttttctgcgtctacacacatactgcggaatttgaaaatgttaaactcacgcccattttttgttaagcgaacctgcttataaaatacaaggccatgatccgttgctttaattgcgatagccgtaacaagaagaatcgggctaagcacaataagtcccaatgcagacacaataatatcaataattctctttgcaagcaaatattcaggacttgccatataccgactaactgtaagcatcggcaaatgaaacatgtgcatatggcgtgcaccactcatgataacgtcaccgatacgcggaatcacaaacatattgatactgtgttcaatacaatacttcaagataatgttgcgatcatggctatgtataccgcttgcaaataccgtttcaatgccgtccaacacagaaagatctttcaggcaatcttcagcacagagcgtcagaacaacatcatatttaccatcaaggccatatttgccaatcagcttttcaaatccccgccgtacatcataaataatagctgttctttttgcgggaaatgttgcatagtaaccatgatgtgccaaataagcccacaaaaatgcaagtatgatttgtccgacaagcgctgccattccaggcaagaggtttgttaaacctttacttagcagacaaataacaacatatataatgagatcactcacagcaactgccaaaaactgtgcgtaaacaatttcagaaatccgctgtatggacatcataaacgcgtcataaatacgtccaaaaataataaatagaactaagaacagcaacacaacaattaaattacctttctcatctaacggtgaagcggttcgatcagaatagtataaacaccagcaaagcgcaaatggaattgtcatcaagaccgcatctacaagcttaatcagccgcaaaagcaaatcgtgtttgaacttggacatgaaacctctcctttattcgttcaatattaaatccctcaattattctaaatatcacttttcactttttcataaaaaacattcatcacaagcgcctgcaaggcatcttcatcgggatagaattccatgtattcctgccctaccttggcttcaccgtctatggtgcggatctcggaaacatcgcttttactgagtaagtccgcgattttagaaagcttttcagctgtgcagtcggaagtaagataatcgctgacctgcagaatcgcattcgtagcgaaccacgcatcgctgtcggctttttcggttagcttcttttgcagtgctataaggtactggcgctggcgctccattctgtgcagattagagctatcctctagcccgccacgtgtgcgcacataagttagtgcatgattacccattaatgttacggtctcgccttgtacaagcgttgagtcaatggaggaaaaatcatccatcactttcacctcgacgccaccgaccagatcatttaaaattgccacaccatccattgtaatggagatgtagtggtcaataccaacgccatacagcagattggaaacagcctctgccgtgtttagacagctgtcccgctcacccgaaccgtatgtatgcgccaacgcaagctgaccggtaaatgtaccggccacatcgccccgaacgcccaagatctgaatcttcgtcatcgtatcgcggttcagctggatcggcgtgcaagcgccggtctctttgttaatcacgagcagcatcagaaagtcagactgttcattatttaaatagttgctttcttctgtctccgcatatttatcgagacccatcagcagtacggtctcaagatcattgcggcgcgcataccacccgccgttataatacgtcagctcccgcgtatctccggcttcctcaagcgcagaggaactgcttccctctgcgtttgaggaaacatcaggggcagtatcctgtccctgattttcatccaaattccggagtaaaagagcagctgtcatcaaaagcatgaggacggataacccgattgccatgccttttaagacgcgcatatttacccgcagcttcataaattagcccttacgcttcttagaagcaacaacagagccgatcacagctgcacatccgaggcccagagcagcaacgcctgctacacgcagaacgccgttgtcactggtctgcggagaagacggagcattggtgctcggcgtcgttgtgtcagcagtttcctgcttgtctacaacaaaagcgaccggggagaagctgtcaaacgttacgtcgaccgtaccgtcagcattctgctttacgcgatccttcgggatgatctcccagttggagccctcatagttgtgcagaacgatcagcgttgcagactgggaaagacccagattgaagcgaacggtgatagggctactctctgctgcggcacccgtgacggaaacgtcgaacaggtcacgaacaacgagatcctcaacagaagcctcgctgccgatctccttcaggtaatcgccgatggacggtgcgatgtcggtgagcgttgcagcagccttaatctgctcgtaagcagcctttaagccgtctgcaatagccgcatcagcgctgtctgcagcggaaactggagttacaataacttcgccgtctgcaaacgcgttaccgtcagcatccgttgcggaaacaactgtcggtgcacccttctgctcaacgctaggggtaaagctagcagcaaaagacggcacagcaagagcaactaccagcaggattgccgataagattactacgattttcttcatggttaaaacttcctttcctaaacgggtgattagacaccatttattattcgacctcatcgacgcattttgcaacgacgagaaatcgtctgtgtgaattgccctggaggcaggtggacaggataagcagtttatcctctggggtaacgggcacatctgtactgtgttgcgcaccgatctcacgcacatcgaaaatgctgttcaaaaacgcattgtatcggcgtttgctcgtgaaatcatacgtgtacaaaatgtggcggttatcgtatggcacagctgcaaataccttatagtgcagctccttttccggcagatacacggtgatatcgccgtgctccgccagcgcattcgattcggaatagacctgctgcagcttgccaaacattgtgccggcaagcatctgatgcccataaagcaccgtagcggggtcgtccatttttccgtcgttataagagctttcggaaaagattgcacccatggagttatcgtttccgtcgctgtcgtgcgtcaggtagtaatcatcgtcccccgcgcgctgcaagatcggaaaatcaaactccgtacccggaatgtacagccaagcgtaaatatccgggttttctttctggagtgacgcaaagtcaatcggactcacatacggcactgcggaatctgtggatgcggaagataccgcttctggcgttgctgtcggtatagccgtagccgtagcttctggtgtggggtctgccgtttccggctgttttccgccgcgaagcagaaaaataccgagcacaatgcaggtagcgcccagtatcgcgaccaaaatgatcagtgcgcgctgtttcacaggcgttccccctttcctgaaagatccggcaggtttcgttgaaattcgcgccacacatcgcgctcaacggacttttgaatcacttgtattgcttctccgagtctcggaggtcttgcagtcatgttgtggcagtcggagcccagcacatcaatctcgccgcgctgcagcatcttcactgcttttcgttttgtcctccagcttaaaaagaacaaagcgttgcattgcattttcacgccctgcgcccgtaacgcctgcaatgcgtcactgttgtgaaacggcaggtagcgctcaatgtgtgccaataacacctgtgtgtcccgtcggttttgaatctcggccacttcattggccatgcggcggctccactttgcaaaaggcatttcaagcagcagtatgttcgtgttttgcagccatagcgcttccagttcgtcaatacggctgacgccgtcaaagtaacaaacctctgcgccaagataaacacgcggcaaatccggcgttaaagcttcctgcagctgcgcggcacaggcagcccgccgctccaaaaacttctgcgggctgtactgcgaagcgtaaaaatgcggcgttgcagcgatttcggtgatgccctgctctgcggaggtccgcaaaagcttcaggctctcctccacactactgctgccgtcatccatcttcggcagaatatgggaatgaatatcgagcatgcgttatttctcttttccgtttccggtcttatttttctcaccgtagccgtagccatagttgtaattcttatagtattttttctttccctccaacgctgcgttcgtcatcacgaagcccaagatcttcgcttccgcaaagtgcagctggcgcacggtttctgcgactgaacggcgtgtagcgtaattctggcgcacaacaagcagcatgccgttcatgagcttcgatacaacgagcggatcggaaacagccgttacaggcggaagatccaacaggatataatcgaaatcacgactcagaacatccagtgtaatgcgcatctgctcggagccgagcagctcagacgggttcggcggaatatcgcctgcgggaattacccacatgttcttgtgcagctcgcagcggctgagcacatccgcgcccgtacactggcctgcaagcaggttggaaatacctttctttgtctgaatgtgcagacgttttgtgtacgtaggcatacgcatatccgcctcaatgacaagcacaagcttgccggcttccgcaatggaatacgcaaggttcagtgtggtggtgcttttgccctcgccgcgcatagaactcgttattccgataattcggcatttctgctcatcggaaagcgcaaagtcaaggttcgtacgcagaagcttgtatgcttcggaagctgcaaagtttaggttttcaccgagcattgcgccgtactcgtagtcggaggctgcattcctatattttctcatgcgttttcctccttcccacctttgctgccatctctataatagtaatagttgcttttcgaattcttctccgtcagatccggcaccacagccagcagcggaaggtcaaacgtcacgcgtacgtaatcttcgttgtgcacaacatcgtccagaagatacagaacagtaaacacgccacagctcagcacaaagccaagcattgcaccgagcatcgtgttcttagaaagactcggcgaagttttcttggacggcaccacagcgtaatcaacgatgcgcacggaactaccctctacgatgtccgcaatgcggttcggcagcagctctgcaatcgtgttcgcaatcttctccgcttcttccggactcgcgctcgtcacagagatggaaaagacctccgtggagttcacagcgccggcttcgatcataccggaaagctgctcgtaatcatacggcagatttgcttccttaatgacctcctccagtgtgccacgggtcttcaaaataaccatgtaggtctcaacaaggctctgcgctgcggttaagtcactcaggttcacctgcgtgcttccgacggaaatggaactgttgttcacatacatcatggcgctcgccgtataaagcggcgtgatgaagagctttgtgcccgcaaatgccatagcagccgtgataagcgtcacaagcacaatggcccatgctttgtgccacagggcttttgcaagctgcagcagatcaatctctgtttcgttttctctgttattacccacttgttttccccattccaaattttcttttttctgcacatctgcgaacaccctatatataaaaggaatacattcgttttcccatcaacgaagggaagaaaatcagttgcacaaatttatccttattctactatatttcgacgagaaaatcaagtgtattcccgctatgcgtattatcttttatgtgcaaacatgcgacccccccccccgatttttttggtaagtttgaccggcttgacaaagttcaacttaattttgtgcttttcggcattaactccctatattttgttccattactcaaattcacctatttactttattgaaattttaattctatattttttgccattaaaccgtgtgtttcctgccgcgcgctgcattttccgattactgccttaatgtgtgtaattaatttgcatgtattttttaaaatactatccagcctcttaaaataagatgaatcaaagttgaaacaaaaatcacttctatttgccaaatatttgaatttcatttaaatcctgcatgattatcattcacctaatattgctctttgaattcacaggcgcatctaagctttgcttttatatgtattttttataaagtttcaatgctatgagataaagctaaatttctatgctccactttaaatccatcaaaaaaaacatccccccctaaaaccagaaaaacgcgcagttcggtttttcatacggatatacccccaatactgggtgtccagtattagggggcatatcctaccaactgcgcctttttcacattcgtgtattttgttttcaagaaatttctcggcgccgctttggcgccgcttttatttatactgacggataaaataaaaaatcccaaacctcttatttctaagaagttcgggatctccgtgtggtgccggtggcgggggtcgaacccgcacgatgttgccatcaacggattttgagtccgtctcgtctgccaattccaacacaccggcttaacaaaatttattatacgttaaaccggtgaaaaaagcaagtgttttttttattatttcgaattttattcgtttgcgggcacagaaacgtcaaaataacggtactttgctacgcagtccccctgcgccgtaaggcccacaaagcagcccgtaaacgtgcagttcatgcactctgtggaaagcagctgcgtgctgccggtgccgatctctttcatctcttccccagctttacccgcaaggaacgtatagcgcaggcggttggccttgatgcacagcgtcagcgtgtccgttcccgggaagaacaccggctcgctctcgatcagcatatcaaccacgcggcggcgcagcgtgacctccataccgccatttttacgctcggcaaacagctcatagtggtgctcgttcgtgtggaaaaccgtcatgcccgctttgccgtctccggaaagcgtcatttcggtcgtatagttcaaatcaaactgctgttggcgcacaccgaagaatgtgaccgtcttcagctcgtcaagcgtcgcctcactgccgcgcagtgtaacgccgctcttatcaaatgtatacttcatgcggtcgggtgtgcgcagatagctccagcgcggtgcaggtgcagctgtgttgaaatcatcgtgccaactgcgcgcaacacgcacgtttccttcgccctctgccgtcatgatgggctgaatctccttgccaccgtatacgaccggccagccgttctcctcccatgtaaccggcgcaatcatcgtctcgcggccagtgtgatgcagcatgaaaacagacggacgaatgccgtgaaacaccatccaccacttaccctccggcgtctctacaaggtcggcatgtccgagcgcctgaaactccacgcggtgtgcattgcggtgcgtgaggattgggttgtgcggacaagattcgaacgggccccacacgcttctactgcgcgcaatggtctccatgtggccgtactccgtaccgccctcggcaatcatcaagtaataccaattgccgatgcggtacatgtgcggtccctccgggcatttgccgccggtaccgtaccaaatgcactttgtctcgctcagctttgcaccggtctcaagatcaatctcaaactgtccgatgcagttgttgccgttttcgtccgtgtgtgtaccggtgtaatatactttgccgtccgcatcccagaacaaagacgggtcaatgccctgatggtcgatccagatcgggtcggaccactcgccgcggatgtcatctgtccacacaaaaaaattgccgccgcctgtcacattcgtcgtgatcatatagaatcggccgtcgtggtagcggatcgtcggcgcaaaaataccgccggaggtgcggcagtccaccagcggcaactggctttcgcgcgtcaaaacatagccaagctgctcccaatgcagcaggtcacggctatgccaaagcggcacgcccggaaaaaactcaaacgagctgttgacaagataatagtcttcacctacgcggcaaatgctcgggtccgggtaaaaacccggcaggattggattttcgtatgtcatgtgtactcctccaaatttaaacgtttgggcatattgctcttgcctctttttcactctataatagtatatagtctgcgttatcaaaaagcaatgcggataaaaaaaacccggataacttccgttatccgggtactggcggagaggatgcgactcgaacgcacaatgccttgcggcacaccacatttccaatgtggctccttaccattagaatacctctccaagcgacgggtattattatagcgcatgtctttcaaaaatgcaagtgttttttcaaaaaaatttcattttatttccttttaggcaatattgtgcgaaatatttgcacatttatatattaaaactatatagcaggttgtatctttttcattcaattgtatggctcacgtatattttatgtaaaattcggcgaaaacagggtgctttttcctctcgggtttgctataataaagtaaatatctcaagaattcttgcgggcccgctttcggcggcgctccgatttagttgctctacattgaaaggcggtgctcatattgaataaaaaactttcgggcgggccggctgcggtcatcgagatcggctccagtgcggtgcgcatgcgtgtctcgcagttaaagcacggcgagatcgaaatgctggattctctcgaataccctgtgttcttcggccacgaggtcttcaccacgggacgcatcagctttgaaagcctgcgccaactctcctctatcctcacaaaattcacaacggcgttggagggctacaactgcaaaaacgtgcgcgtggtctcctccaccgtgatgcgcgaggcggaaaaccgctcgttcgtcatcgatcaactcaaaattcacaacaatctgcacttggaaattctggaatacagcgaagaaaaagcgctcatctgctccgagattatccggcttttaaaagaagaaagcaagatcgagatgaaagacgcgctcatcgcgtat

SEQ ID NO: 1162 - DNA, 44627 bp, unidentified
  source 1..44627: mol_type = unassigned DNA
gcgaacttccgaagaattccttaatagcagctgttacaggcttaatattaataagtgactgtggagatattccgctaagatcctgtgtagacattctctcacggacaactctttccattcttgagataccaattctgaactggttctgaagaagctctcctacagctctgatacgtctgtttccaaggtgatcgatatcatccttagtaccaacaccatattcaaggtgcatattataattaatagaagcaagaatatcttctactgtaatatgcttaggaataaggtcagcaatgttcttagtaatagcttccttaatatcctctaaagattcattctcagcaagaatctgtgcaagaacaggatagtatacatactctgttacaccaagctccttagcttcttcttcgctgatatcaacccatttagtaatatcaaccgcacggttagaaagaatcttaacaactctgtcagatactgtaccatcagcagccttaacttctacagtaatgaatactgaaggaacagctgcatcctgaatagcctgtgctgattctcttgtaagcttctcacctgctgttgcaataacagttccgttctcatcaacaacatcctcagcaagaacctgtcctgtaattctgctcttgaaagaaagcttcttattaaacttatatcttcctacgtgtgcaagatcatatcttcttgggtcaaagaacatacctgaaataagtgcttcagcactctctacagataatggttctcccggtcttaacttcttataaagttcaagaataccttcctgatagttagtagaagtatccttctccatagtagcaagaagcttaggttcctcgccaaaaatatcaagaatctccgcattagtaccaaatcctaatgctctgataagaacagtaataggaaccttcttattacggtcaaccttaacatagaatatatcattagcatctgtctcatactctaaccatgcacctctgttaggaattacctgacagctgtacaagaaaatcttaccatacttatctttctgtatatcataataaataccaggtgaacgtaccaactggctgacaataactcgttcagcaccattaattacaaatgtacctgtcttagtcattaatggcaggtctcccatgaaaatctcatgctcgctgatgctttctgtctctttgttatgaagtcttactgtaaccttaagaggcgctgcatatgtagcatctctttctttacactcttcaattgaatacttaacttcgtcttcacataacgcaaaatctacgaattccagacttaatcttccattatagtctgcaattggagatatgtcatcaaagacctctttcaagccttcattcaaaaaccactggtaagaatccttctgcacctcaataaggttaggcatctcaagaacttctttctgtcttgagaaactcatacgcattgccttgcccgacgttattgggcgtaatctgtttttctccattgacgtttcaccccttagttttcttcacattaatatattacattatcagtaaatgtgcaaagaataagcacaatttaccacaatagtgcattgtccataatacatcaaagatatatatatgtcaagggatttttgaaaatttccatgaatatttagaattgtataaagataatagtgtttctgccatagctggcataataaaataaagatgtgatttatagaaaaaagaaaagacaggagccgtgaaggcccgctgtctttcttattatattcattagaacaatcaagtgaattacttaagagtaaccttagctccaacttcttcaagcttcttcttgatttcctcagcctcttccttagaagcctgctccttaacaaccttaggtgcgccatcaacaacgtccttagcttcctttaatccaagacctgtgatttcacgaacaaccttgataaccttaaccttctgatctccagcttctgtaagctctacatcaaattctgtcttctcctcagctgctgctgcgccagcacctgctgctgcaactacaacgcctgctgctgcagatacgccgaattcttcttcacaagccttaactaaatcgttaagctctaatactgataaacctttaataacttcaatgatttcctgtgttgtcattattataatctcctttttaatattattctagaattgaaagagcatctatgctgctttcatagttaattcagtgttaaactgattaagcaacttcctcgttcttctcagcaatctgcttaataacacgagcaaagtttgtaataggtgactggatacttccaagtaactttgaaagaagttcctctcttgaagggatagtagcgattgtagcgatacctgctgcatcgtagaatgttccttcaacaacgccacactttaactcaagagcatcagctgtcttagcaaagttagctaagattcttgcaggtgctgtagcatctgtcttgcagaatgcaatagcattagttccttcaagagtatcagtaattggctcgaactctgttccagcaacaactctctttactaaagtgttcttataaaccttataaaccacaccagcttctcttaactgcttacgaagctgtgtatcctgttctactgtaagaccactgtagttaactacaacaacgccctgagcgccgtcaaagttatctttaatctcatcgatagtagatgtcttaagacctacattctttaaaatagccatgaataattacctcctgttagattcttgcttcatatagaagcgattttgcctaagtgaagattattcgtctatagtttccctacaaacaaaaccctctctgccaaagacagagagggaataattaatcaaatccttaaatcctcggtaggcgtgttacctttaaccatcatcagtaatactgaatccggacctgctgtctacggcaaaatattatgttaacagcaaaatgctgctcacaagctgatagtatactatcaaaatatattaatgtcaaccgtttttaatcaaaaatctgattaacccacatacttggctgtgcttaacttaacaccaggtcccatagtagaagtgagaactacacttctaagataagcacccttaagtgaagatggcttagccttaacgattgcatccataatagcctggaagttgtctgataactgctcctctgtgaatgaagccttaccaattggcacgtgaatgatattagtcttgtcaagtctgtactcgatcttaccagccttgatatcattaacagcttttgttacatccatagtaactgtaccagccttagggtttggcattaatcccttaggaccaagtacacgaccaagacgaccaacaacacccatcatatctggagttgcaacaacaacgtcgaactcgaaccagttatcgttctggatcttaggaataagctcctcgccaccaacgaaatctgcaccagctgcaagagcctcatcagccttagcacccttagcaaatactaaaacacgtacagtcttacctgttccgtgtggaagaacaacagctcctctgatctgctgctcagcgtgacgtccatcacaacctgttctgatatgtgcttcgattgtctcgtcgaatttagcagtagcgttcttctttactaatgagatagcgtctgctgcttcatataatgtctggcggtcaatattcttggctgcctcaacgtatttctttcctcttttcattataaacctcctagtggtaatatcggaaggattctatctttcctcccacaataatcatgaatcaaatgtagattagtcttctacaacgatacccatactcttagctgttccttcgatcatagaagtagctgcttcgatagatgcagcgttaagatctggcatcttaagctcagcgatcttctgaacttctgctctcttaatagtagcaaccttagtcttgttaggtacgcctgatcctgacttaatgttgcaagccttcttaagaagtactgctgcaggtggagtctttgtaataaagctgaagcttctatcagcataaactgtaataactacaggtatgataagatctccctgatctgctgtcttagcattgaactgctttgtgaattctacgatgttaacaccgtgctgaccaagtgctggaccaactggtggagctggtgtagccttgccggcaggaatctgtaatttaatatatcctgttactttctttgccattttggcacctcctaaaaataaatgtggtaattggcgaccatcataatatatcctgcaatattcgccctacaagaattaaccatcaggcaattcttgtgaatgaattcacgcagctaattcattctggtctcccacgtcccaggatcgggactgcttcttacaataacttcacatctgtgaaatcaatctcgaccggtgtttcacgaccgaacatctcaacattaattgtaaggcactgcttgccctcattaatattggtaatctcaccaactgtatcttcccatgcaccagagaggatcataaccttatcgccaaccttgccagcgaactggataacaggcttaacttcctgttcttcctcaaggcttatgccgagattcttaatttctgttggtgtaagtggtactggctttgatccaggaccaacaaaacctgtaacacctcttgtgtttctgacaacataccaactatcgtcgttcattaccatcttcacaagaacgtatccaggaaacattttcttctgagcagctttcttagagccatccttaatctccactactgtttcaagtggaacgataacttcaagaatctgatcgtgaagatttctgttttcaactgtcttctcaatgttagccttcaccttgttctcataacctgagtaagtgtgaactacataccattttgcgtcatccatacaatcacctattccttattttacaatgaactcaattccaaagcggacaattaaatccacaactgcaatgattacacctaataatacggacacagccaatacagctacggtttccttagtaagcgactgacggtctggccaaataatttttgaaaattcagctttcaaacctttgaaccagttctttttctgcttcttagcttttacagtatcacccatgaaatactcctcactgtactaattactttgtttccttgtgtaatgtgtgtgatttacagaacttacaatacttctttgtttccattctgtctggatgagctttcttttccttagtcatgttgtaattgcgctgtttacactcagtacatgccaatgttatctttactcgcacaacttccacctccaattattatttttgtaggtgttaaaacaccaattggtttctttgcccgcctaatcaatgttgggttgttgaaattcaggcacgcaaaaaagaccgcttccatagccgttctaatatagcacagtacattccaactcgtcaacaacttttttaaagaaaatatagtgacaaaaaatgaacttcatattataatgtttgtacaaaaacatacgatatatataaggaaatggatttccttacattttctaccgattattacagacaaggaggtgactgttatgatcagcagcgtgtacagctattatcttgcccagtatagacataagactaactcaaagtacgatacacacactaaagcacaattaaagaatacatatggcagagttctgaaatctaacagtcagactcctacatataagacagatatgtcagaggctgcgcagaaatatgcaatcgaccttaaagagaacgccagagaattaagtaacattgccaacgaactttcaggaagcgacggtcacggcatggtatttaagaaatcagcagtatccagcaacccacaaagtgtaaccgcagaatacataggcgacagcacttcacctgacagttcaagctttgaaattgatgtaaagcagctggcaaccagccagattaacaccggtaatttcttacagcctaacaatcgcgctgtggaaccaggtgattattcatttgaccttaacattaataacctgacctatgaattccagtttacggtagatgaggaagaaagtaattctgacatacagaataagctggcaagactcatcaaccgatcgaacatcggattagcagccaacgtcaatgaagacagtctcggcaacactgctctctcaatagtttcagacatgactggtataagcggtattaagccaacaatatttaacatcagtcctaacaatgatatccagaccaataatcctgatttcgttgaaggctttgatgaaccaacaatgaagaataatactaacttcattaatgcatttggcttagacagagtatcacagtatccatctaatgcaatattttcaattaatggagaggaacggtcttcggcatccaacgatattacaattaacaaagcatttgcaataaacttcaacagtactacggaggagcctgtaaccataagtctcagggaagatactgattcgataacagaaagtattggcgaacttgtttcaggatacaacaggcttgtttccatcgccgcagataaagagaacgataagtttgagggcaatgccaagttaaagaaagaattttcaagaataatgaaggattaccagccacagcttgaaaagaatggtctaactgttgattcctctggaacaattgaagttaataaggcggttattcagaaagctgcttctgacggcacactttccgatgtatttaacgctttggattcattcaagaaatcaatccaaagaaaggctgatgatatctccatcaaccctatgaactatgtaaacaataagattgtcgcttataagaatccgcataagcctgtgaatgacccttataatctttctgcctactcaggcatgatgttcaatggctatatctaactaccataatataaaataaggcatccgtctggttcatgtaatacataaaccggcggatgcctttatgtttcttattattcattaatcagtctgcttcctgcatcatgtaactgcttaacaaatgtactaagccttacaagtgctttagaaacagccacatcatcatcagcctttacagcctctgaaagctccttaacaccagaattagcttctgcctcgtcaactgccccagcctcaataatatccttagttccattatatacttcaaaaagccagttaaggccttcaataataacgttcactgcatcatgagtctctggaaaaggaactcctgcaagttcatctgagactttctctattgctccaataagcttctcgctgtaaggaacagcttccttaagtacatccatctgctgctgtctgtaatcatccataattctaatcacctttctttatgaaccttttgaatatatatcggctggattggtggggaattaaccttttccttcatgtaaaatgtaatctcaaaccctcagccttccacttgagacctcttcgcagaactcgtcaacagttcccttaaagcccacatttctaatctgtttaatcaattcctgctccatgtgaccgtaaaatgggtagtcgtgatttgaagctccttttactggaatcatataattacctccgtacacaacttttaatatttcgtcataacccgtcgaaacatttagcatcatattctcaaaaggcatcttaatcacatctttaaagcactctttatgcattctataattgtcattattaatccagccatcataatatgctgcatagtcagcctcttcctcataacacatagcgcatactttatctatcaacttccatatataattcctggttttagaatctaatgcaatatccacattacacagctttccgaattcagcaatacactgttttaagcagccatttctattcaattcattccattgtcttaatatcatcaaaccaagctgtataatttctctctgtgtctctgcaaattccttatctcttgaaatataatctataggataaatgtcaattccaactctctggtatgggaatccatgaaaatacttcatgtaatcattaaaatcccataattcttcgtctgcaataacccttgactgaagtacaaatgctgcttcctgcagacgttcacaatcggaatacattccagccacaacaaaaccatatggtaattctttaggaagaatctttataaggcgattataatctaccctcataaggcttatatcaatatcatcatcccacggaatcatgcctttatgccttactgcccctagcctcgtcccaaattctgcagaatattttatttcattcctatcacatatatcagtaacaaccttaagtacttccatctgcgcagcccacgcccgcttcatcataggcggaacttcaaagccgtctcttgtctccgttttaaaaaaatcatcatcaaatctcattacatcttcctcaactaatcattcataaataaactcacacaccgcatcttcatcaaccgaaccatctgcattcctcggaagcggttcttttcttaacacaatcttctgaatctcccagcggtagcccttcttctcattatacttatcaatacggcgtttaaatatatcttctgatgcactcttatcaataggcacaataaccgccgtaagcctgttattgtaaaatgttataaatccttctgcaactccattaatagctgtaatctgttcattagttcttacacggcttatcttctcacctgtaggcagcagaataatatccggattacgctgcaacagaacaagtctgccgacattgttaatccttccgtaatcacctgtatgatacacaccgtcttttaatacattttcagtagactccacgtcattataatagcctttcatgacacatggtccacttacaataatctctccatcatcagcaatagatactgcattattatcaaaaagagtatacgaaccatcataaagctcattaacccctacacaacccgaagtctctgtcattccatatatattataaaccttcaaatcactgtcacagagattctcaaaaagtctgaacgggcagcttgcaccacctatgataatagtattgagctctttattaaacccacttatagctcgctgatagtcaatcatagaaggagtacctataagaatcgttggattataataataagtatctgcatcaacatgtcttaagcctctgcctatacacaccatagcaccattatacaaaggccatatgaggctgtatataaatccaaattcattatgaagcggaatctgtgcaagcacaatatcatcacttgtacattcaaccctgctgtttatcgccataaccgcattaagaatattatcaacagacagaacaaccggcttatcacattcattagctgtagccgtaaacatgataatatcgccctcctgcgtattctcatcatatataagtccgtcaacattatccttctccgcacttgatatgataatagaattctcatcagagagaatatactggttagtagatgtcagtgtataattaacttccgtcttcttaagaaggtcaaccctcgaatcatgaggaaggaagaaatcaacaagtgcaagctcctttcccgcaacaatcgttccgaacatattaacgatccatctatatgaagccggcccgaatattgcaatcctctttccttcaaatttctgaaaatgtaatgccttcttagttacatcatcaaaaagcttcgcataagtaaccttcatcgtatcataaacgacagccacagcgtctggctgactctcggcattactctttaacatattataaaatgtattcttatctgtcatgattttctccgttcttctatcgtcaattgttatgctacacaataactgttataatgtattatattatcatttttaaatttaattgccaactaaattagtatataattaagaactataaaacacatgtcaatgaaaggaaatatatgaataatatctctgttataatgattgcgcacaacaaaaaagaattcattaaatctcagatcgaacaattatcttcaattcacaacatcagtatggattcaataataatagttgataaccactcttctgataatttatgcgattttcttgtttctcaatcacgcttaaactacataatatgtgatgataaaattgaaaattattctttaattctcaacacatgcatttcagaatttgttaatactcaaaatgatatactcatattagaccctgacagctttcttcttcctgaaacattaaaaaaactttcgtcagcattaaaccctgataatggtatatatgccatctgcccgcaaaatatattagatatcagcaatgatatacactctttttcagcggcattaaactacgtaaataacaccaatgtatctaaaataaatttattcaaaattattaaacctgaaatcaacactattttattgagccataaattattatctgaacatacattatttgattcagaaattatatcagatgagttatgtttgacagacttctgtataaataacattttaaatgatcaatttacttatatggcagataatgtatatcaatattatattggcaatcacaattcctattatttccccactaaccgtaattgtgatttagcatatatcagacaaaaatggcacatgaattacattaacactataccaagcagtaatcttatcagcatgattaacgaaccaattgataaagaacttaatgttcttgaaattggttgcgattgtggcgcaactttactggctatacaagcactttatccaaactcaacaccatatggtatagaaattaaccctatttctgcggaaattgcttcgcacattgcttcagtaaaaacagctaatatagaagaatctgttgatctctggaatgacattaaatttgattatatattatttggagatgtattagaacatcttcgtaatccatcaaaagtcatacacaactgccgccacattctaaagaaaaaaggtaaaataatcagcagtatacctaaccttatgcattttacggtattacatgaacttatcaatggtaactttcattatacagacacaggtctattagacaaaacacatatccacttctttacatacaatgaaattgtaaaaatgtatgaagaaaatgattttaatgttatcaacacggttgcatccaatgtaacacctatgttatccaaaaaagactctgaattcatagacgcgctaactaagctatcatcacacaaaagtgatatacaattcaaagcctttcaatatattacacttgcagaaataaaagatactaaaaacaattaaatattttattattaaaccatctcaataatgttaatgaaaatatatttttacagatataacaatatatgcgaacctgctgtaatcgacgcatttaaaagacttggtttacatggctgggaatacttatctatcacttatactctttcagaaaaatatcacgaaactcatcatatcttgataaattaagaaaaccatcatcatgtatacaccacgatttatccatatatggcactacaactttataaccatttcttctgaattcttctccctgcgacacgtcataaaaatcccagcctgtgaataaatcttctctccacatgatatcatactgtgtagctataaatagtccatcaactgcttccacttccatatatggcctttcattcatgtcagatgcaataaactctttcgctgttaagacattacttgaatatactcttccaactctaggaccattccacatacagccattctcaggcatgttcggtgttcctaccacaccaagcattccaacatttttatcttcgaatattttaagaatatcttccagcaaattaatattaactataaaaacatcctgatgcatatatattttatactttgcatcagtctcattcattgcagcattatagccagaagtcattgagtcagcatcttttaccgttaaaacatctattaaatatccacctggtacaaccaacttatttatataatacagacattcactaatatatttatcatcgttataacatataataaaacatatctttttatcatccataatattatctgttaatatcctttccatatttcaacatttgaaatgctttatcttctttattcagtcttatgtaacactcacacaattttaataaaacattctttttatcaaagcatgctgttcttataatatactccacggctatcactgacaatttctcttcttctatcctgtttaccgcctgcatcagtgcctttgattctgtctgaaactcaattctccacaaaagaaatttaatatcacatattaaatcacatatttctcccagactatccacattcatcaaaatattttcttcaatatgtgcagctttttcttcccggtatatacatattgctatatacatataccccatccttgtatcttctaacatatcattctctctgaattcttcatcggcaaataaatctgataactcttgctttgactgttctgtgttctcattcagaagactattaatataccgcacataatcttttttagccatgtatcctccctttaattaaacaccctattaaatatctcttcaaatctgacatcatatgtatgtttttcttcaattttgccaaatccattctgtgcaatctgccttctttccgcatcatgtgacagataatatttacatttgttcattaaatcgtcaattgaatcatatataaccatgtcttcacctggaacgaatacatcatataaatccgcctgataattagacagtagaaatccgcctgctccacatatatccatgcatcttaatggaattccacttttaatgcttctgagtgtaatattaagattaatcttagaatttctgaatacatatggcatttcattataataatctacagttcctttgttatttacatttatgaatcttacggatgcatccggggtatagagattaattttattttccttgcctaattccctgccaacccgagacaatatatctgttctttcatcagtcgccattcttcttgcaaggaaataattagcatacacatactgtacagtttctaccccatcctcattaggcttaactggacacactcgcatcatttcatcaagtacatcacctttcagcatatcttctaaaaagaaatacccatatatgctcctctgtactttcattattgcgtccaaatatcctttcgtataatcattaactccacataatctatcataaagattatgtttttcattgtacatagaacctataaatgatatatctccagcatacaactgattttttccctcatattcatcattaaacatactctttaatctatctgtattaacagccagagggcaataatacactgtttctataccttcattactaagttccatatattgtgttttatcaaatataaacacatagttacacggattaataattgtatatgaatacaataatatttgcgggctatcataaacaattgatatgtatggaacattccttttattacagttattagatataaccgggctataattaaaagtaaacacgcagtcaaatgcccgtccacctacaccttcatcaaattccttttcaaatatatcatcaagttctgtacattttctctggtttaattgttctgaccataccactttgaacttatatccctttttttcaaaacattctttaacatcttcaatgccaaaattataattataaaaaatcaatacattcactttcaacacctcatccgttctattgatgctattatactaaaaaaggctggaacttagcaaatatacctgctaaattccagcctttaattaaagttctattgtatattactgtaagagtgaaagtacaccctgtgtctgctgattagcctgtgtaagcatagactgtccagcctgtgaaagaatgttattcttgctgtactgtaccatctcatcagccatatctgtatcacggatacgtgattctgcagcctgtgtattctcagcgttagtatcaagattattgattgtgtgctcaagtctgttctggatagcaccaagctttgatctctgcttagatactgattcaatagcatcctgaatagacttcattgctttacctgcattctcattagtacttactttaatatctttaacttttaatccagttgaagatactgctgtactaatcttaagatccattgtctgtccttcaagagcaccaacctgaagctttcctgagaatttacctgttaataagtcctgcttattgaactgtgttgttgttgagattctgtcaagctctgcatttaactgttcaatctcatccttgatagactgtctgtcaactgaagtgttagtatcattagcagcctgtgttgctaattcattcattctctgtaagatagaatgtgtctcattaagagcaccttcagctacctgaataagtgagataccatcctgtgcgttatcagatgccttattaagacctctgatctggcttctcatcttctctgagattgaaagacctgctgcatcatctgctgctctgttaatcttatatcctgatgataacttctctgtagacttctgaagagcgtctgttacaactcccatctgtctgtttgtgttgattgctgataaattgtgctgtactaccataattaaattcctccttgaaataaaaacttcctataattaaaccatatttttattaccattgtgatttatgttttatatatcggagctaattcttaatacttaacccctgagtcataaaaaaatcaaaaaaattattttattgttttatcttgctctcaatcgctttcttaagcttcgtagagcttgtactctgcgtataaggaaagaataccatagtagagccattcttctccaagaattccttttcagaaagccatgctggatcatgctcgtaatcacttcctgagaactgtacatcaaaatgatatttcttaaacatatctcttgttccggcaaaattaagcggcagcttcactgcttcatcgacatatctgcatgaacgcaccatctcaatacgttcttcaaatggtacaaaaggttctgcctgcttattaagccttacgccttcatctgacacaacacctacaatcagatacctgcactgttccttagctcttttaaacatattaagatgcccgatatgaaacaggtcaaacactcccgcaatatatccaacattgtatggtttatccatgtccgattctttcaatcctgaatcgccagtctgcgcaagactctgtgcaacatgttctttgcttttattaggataatcattacccggatcatatatatgataatctgttattcccatatcttttaactggttaacaacaccattatatccctttatacatataatgatatgtctgtctttttctggagtatcctttaatatatcaggtgaattaatcggcactccctgcattgtcgttccccattttgcactgttattatcaacaatagaataaatgttataatctcctgcaaactgaaacaaaaatctttctgtaaatcttcctgagccaaaaagaataagcttcttagaatcatcaaatccatcaaatatatcaacaaaaattttttgatattctttagcactataattaatcttttccctgttagtataaagaattcttccatcaattctcttgttctcataatatggtcttaactgcttctgctttctcaaagtctccgtaaaccttgaggacatacgctgccatatatcttcacattcagctaatccatatctatccaggagttctgttcttggcattattctttcatattctttatcagtcccatcatatataatagatatggaacgatacataattgccttagccggacagttatcccaataaaactcctgatcataatatatgaacctgctctttgaatcttcaattgttccatcatagaaacagttaagcggaaccatatcaatatatcccttttcaagaatagttcctaaatcccgaccatcagcactattcctatctttctccgatataatccccgtatgctctgaagaattaagaattaattcgtacatatcatccattgcctttaaaaatgcatttttatcctttttagcaatagcctttaattcattcatcgcaaccggagcatcaacatatggcattataaatatatcattctcaacagatgaatcaactacatttattcctcttgtatgcaaatcatcaagattatcctgcatctctttaagtttatgtattccttctttgtaaacagccctcttaattacatttctgactccatcatgttcacatatgctggttacaagcgcattatcatgtcctctgtcaagtgatatagttgcatgaagggtatcatctaaccgtccgtccatgctgcattctataatgtaagcattagccattttatgaaacatgccattctttattaaatcagtgtacaggtactgttcttcaagaaacacactatccggatagttataaagagggaaatacctcatagccagttcttcaaccggttcatatccttctgcatatacaagctgcgtttcctgcaaagacggcattacagaataaaatttatcattctcaaatccagcctgcgaaagcatcaactttaactctgccatagaatagcatcttcctgcaatcaaatttctgtctgcatctgataaccttctgtaattctccatcccatcaaaactgtggttagtatatgggtctctgtctccacatatatacttaattgcatagcggttctctgttccaagcacaatccttcctgatgattttagcattttgtggcatgctttcagcaattctgctggattctgacattcctctataacatctataccaactatgtaatcatacctgtttacttccagctttgcctctgctagttcaatgcatgaacataatgtaactgttcccttctgctgcaggaattctttaactgcggcatcttctttatcattatacagatataaaatatcacaatctggcttaaagttataccacactaatgcgcctttggaaaattctttaactaattcatcacagctgaccgctgtagtattctctgccatatcattcctccgaattattattatctggcgcctgacaaaccatattactcacaatataacacagtctcgtttataagattagtataatgtctcaaccacattttataatctggattaagagataaaatatattctggtatttcaaatatgtcttctggtttatgatatacacagatagctaatttaggcttgtacttacgtattgtatccgcacatcctcttaaagctgctaactctgctccttctatatccatcttaataaatgttggttcttcatgcgtcttgaaaaaatcatcaagtttaattacatccactgtaatatcgccttcattacttattttactgcagctgctgttagagttaaaatataattttccattactatcacacgctccataattaaatatcttccagttgctataatgcccctgttcaattatatttttgcatttaatgtattgctctggctctggttcaaatgaatatatcttcttatatctttcattgccatacttaaaatactgcattgttgactggcaatcgaaacagcccacatcaacaattacttcatcattggaaaatttaaacacatcataatattgctttggatttacttcaccatatttagatatataccttccaaaattaataatgttttttacacccagctgttttaattctttctctatcgctaaaccatataacatcgagcttactacatataccgcatcaggatatcttttcacagcatctgcacgcgacatatatggaatattccaccactctgtatcactgactgttctgtcgcatacacaagtccactctacatctgtcattgtagctttgatactttttccataataacctgcaccatcaatgactatgtcacatttgtttttatattgctccagttgtctttttaactcttcaaatacatctattttatctttggtaattgatgttatatacttgtaatcatatgtaagagtattcaataccttgcaatcatatatttttcttgataaatcatcctgcatacagcctcttactttattagagtttttaattaaattattgtatattttctccatccctaatctcctgtatcttttcttctgccttctttaatgccatggtcatatattcaccattgcgaagtcgtttacctaccatttcagcattttttttcattatttgataatcattatcactgacagcctccagtttttcaggtaaatcatataaagacttaacagcaaatccaacattttcttttaatacaaattcagcttctgccgcttcatcccatataacaactggaagtcctacagcaagatataatgataatttgtgtggattgtttattttcagatattcgccagtcaagccattgcatgtatccaacgaattaccatcccataccagcccgtatctgccttgtaggttttttatcagctcatctgggagatatgcaccaaaataattaacattatcgtatttgcagttatcactgtaattagccccaaacagattaaacctgacaccattaagctgcttaagcttatatatatattccgatttacttatatcaagattgccagcaattataatcccatcatcaactttaatgtctatttgattatttatcagataatcaaatattttcaatgaaattatacgtttagcgtcaaagccttgtgatattaatgcctctttcattctcaaattatgtacaatccatatgtctgcacatgtttttatcatattatactgctctatataattctcatttacactccttcttaatatttctatatcatgaactacagcaatgactttgatgttcttttcttttttctgtttaatcagtttatatatgccacctgatatatctgcaagaggaagctgaataattactgttgaattattagttattttattacagactttattccattctgatttggtctgttcttttccattttttacagtccccctgacaactgataatactttatatccattatgtagtgctattgatgcgacatcagatggtgccttatgtcctgcattaaaatcctgtaatctaaattctgcaatctggaattttccaattgaattaatcacattattactatattcctcattaatctgacaatatatgcaatacggaagattctgcagttccgcatattgtgataattctttttccacctcctgataatcaaaacacgtaatcaaaagtactgattcactatctacacttgatgcaaatacatcagctgatataataggaattttaatttccaaacaaccttgtatatatgtttcttgttgtgaattcttatcaataactgccgatacctttatatctggatatgtacacaaaaaatctttaaatactttccccgcaccataacaatatacctttttatttcttatagattctatgcaatttctctcaatttttttcatatattgtttatactcctgtatttttatatttacatttgtgtaattcataacaaacttaataattatagtattgaggttacaatttatttaacaaactataatattcaaccttattccatatgattttttcttcgtctatatcatataaatttatcaattcatttcttatgctgtctgcaaggctttcttttaaagcagcaataactatatagtcatattttatagtgcttatgcattcgattgatattacatcatgcagtacttttatattttttccttccggatatttatcaacccaggcagcaattttacaatggcacttatttgttaaatacttgtacaaagattcactgctattccccgctccatatattattacgttcttgttttccagcgtttgataattgtatttatatgttccaagggtaaaacgacttattccatataactgctcaatagtatgcaattcaatattcagtatgtatttttttaattgtcttaatagcacgtatttatatttatcactactaacaaaaaccttttcaagtcctttatataaataataagcatttatgcttaatttttcatcagccgtggtacacactgaattcacatgtatattataatgataaaacgactttcttaatatatatatacttgatatcttcattatataggaatataatactaggcaatcttctccataaaaaaccctcatatctatttcatcatatatagataataatatctttcttataaataatttattacataacgtaccatatataccaaagtcattatttttatcatcaaacagcatagttttataaatattttctggtaaattactataaatcccctgttcaaaattatctaacaattctatatgaaatccacatatctcatcatcccgatacattcctgacgatactaaatcacattgattttctttttgtatgtttataagagtaccatacatactgctttctatccagtcatcactatctacaaatccaataagctctgctttagctgctcttacaccagcttttctagctgcattagctccaccattataacttagctgaattattgtaattcttttatcttcttttgaataatcttcacatattcttaaagtattgtctaaggatgcattatcaactaatataagttcaaaatcatcaatatcttgatttaaaatactatctatacattgtgatattgttttctccgaattatacattggaacaattatgcttaatagcggattactatttttcattacatttcactccagattaatttttatcattataattgttgagcagctggtattaaataattatagcaatctgcaccatgacaatatctgcacatatccaaatatcctttttcagaatatcctaatatgtattccaaaagttctcttctccaattctgacctgtcagtttgttaaaatccagataatcgtcttttccaacattaaaattcaaattatcagatacacttcgagccataacacaataatagaatttattttcacgaatttcatgacatgaagtatggcaagcgtcaaacacctctatcaactcttcatcagaacaatctcttttataataatcaaatccataatccatccagtttttttcttttttacctattctatatttcacattattgtttttaaatatattttctaattttacgtattgcatttctaatttgcttatagcatttgaatagtttgatactctgaatagaacattatattgtttacacatattcagcagctcatcgctcggaaatatagtaccattagttgtaattgaaaaaatattaattttatcacgataattctttccaatgtattctattgcctgtcctaaataagaatataacattggttcaccaccaattagaacaaattcatgtatgtaatccacttttgaaaaaaatacatctgcacttttctttacctgttctaatgtaaggtctggattatctctgccaaccgcataacagccatgtgcacattttttacattttagcgtacatctttccgttacacatatttgacaaagattaagaaatatctgatcatataaatcatatattattaaaggtaaaaccttttccaagaaatattcatatgtaaagaaatgctcatcacattttagtcctctattctcaagattacttttgattttatttgtattttcttcggtagcagcaataataattaaatcttttttcccgctttcaaaaaattctttttccgaaaacaccttctcgttgttaaagcccttttcttgaattttttcattattatctatgaagcagctgaacatcccataatgcttaagcaaattatacaaatcaccacctaatattccagcaccataaatacaaaattttgtatcttttttattaatactgctgacataaagtttttcgtttgttttattaacccatttcataatatactacatagacagcattttactatcttttcctctctacaatattcatcttataaactgactgcaaaaataataagtttcctttattatgaattacattttcaaatatttattttcactaaaaatctcttgtaataaaaatcgtatcatttccttttaactcaaaagcctcctctaatgactctttccatttttttgatacagaaataataactaatccctgagcattaaattcatcaagtgctataactttatatccatgccatgttctatcgtttacagtgtatgaaactattattgcacatatatttatctgatacctgcttaaaagagctactgtttcttctgcactgactccgtctccataaacaaaaacactctctgataatctaattttacttatttcctcatcaagaagctctcttatatatgggtatgttctgtttttaacaaatttttgtaaaagatcattatatggcgcataattcaaaatatttatgctattttccggctctatacatattatatgttcaatccttcgtttgaataaatgtaacctttcaattatttcattatatatatactcatcattataattctgttttgacataattgataattcatcatatatagccagacaggaatacaactgttttatacctaatgtatgcgaaatcgacgaactacattgtctgtatatatacagcgtgtccggtattgctttaacgcactttgcttttatcaatgtctgaattgtaaacaaagtatcttcataataaatacccggataaaaacgagcattattgtttttcaaaaattcaagattccaaagttgaaatccacatgcgctttgatactctttattatcatgcaacaatgctatcaattttttcccatcacatacaggataagttcttttatattttattgtcctcagctttttctttaaatcctcagaatattccaaggcactaaaaaaaactgcttccaccccatatttttctgcagtttcccacaatatttccagcgcctgcggcacaaaacaatcatctgcatcaaggaaacagatatattttcctttgctcaattcaattgccttattacggctaactgacagtccacaattttcttcattaataataatattaaacctggaatcatttgaaactaatatttgtaactgttttaaagaatcatctgtggaacaatcgtcaacacatataacctcaaaatccttaaatgtctggctttttatactttgaacataatcagataaatattttgatttattataaattgatgtgataattgttatctttataggcatattcatccctcatttttaatcattattgtcagttaatatattctaacaacgcctcaattgcttctcgtacagctccctctccaccatttcttgatgcaacaaaattgcacacttccttaactggttttaccgcatcatttggacatgcagaccactctgctttttttattatatctaagtcattaagatcatcacccatacatgccacattcttccattccagtttaagaatatgtaataatttttctaaatcgtctactttatttttgctcccttgtataacatattgtatctctaattctttgcatcgattttcaacaatatcagattttcttccagttaatactactggaagaatttgtttacatggtaaaatacaatgtattccatatccatctttaacatcaaaagatttaaaagcttctcctgaatttccaatatatatctttccatctgtcattgttccatcaacatccataacaaacaattttatactcattaataccaccttttaaaaaccagttatcataatacttatcccatcacctattggatacttggcataacgcccattcatttcctcgagaaattggtttacagcttcatgcggtcctttaaaattcgttgcaaaataatcatgtaccagaattactccacctgaaatcatcttatctttaaaaaacttcaatccgttatatgtaggttcatataagtccacatccaaattaacaaatgcgaaacgttcctcttctaattgctttgctgtatctggaaaatatcccttatgtattataacattttctggataaatcatctttttcattaccatgtcaatgctcgcattagaataatccccaactttcgcttctgaatacaagctgtctttatcaatatctcttttatcaaacccctcaaatgtatcaaaaagatgtaacttctgcttagcataaaattggttaatccattttgcgaaatccccctcaaaaaccccaacttctgcaaccgctgcattatcaaaattttgtatttgggataatttttccaaaaatgaaactctgcttaacaatggcagctcaataaaagttgtatcaatttttctggaatctattcccatactaataagctgttgttttatattcatcatacctggagctgatgttataacaacaacatcccattctaattggaaacattcttcaataccataagtctttattccatttatactcgttcctattttatctttatcattatctgtaaatgctattatttcatatttttctgatatttcatcaaaaagtctttttccaccgcctgctgcaccaaaacaaatcgctttttccactaaacaaccttctttctatgagtatttacttggtgttattgtctcaatatttattttcattgccacacgttctctaaaacttttaaataaattactaatttcttcatttatttgtttatatgtcatattaatatgtcgtattggttctgttccattaatatagttactttgctgctcatccagaccatcaaaccctgcaattgcaattttacttactcctaattgatctaataaattcaataacattattgtgctattatctggcagcacactactttcctcaatcagactagaataattgatgactaacgatttatcatcttttgtatgaatattacttgttaatatatacttttctgaatcagactcttctttattccctttaaattcttcccaacgaattgcattagaaaaaaatatgtaatcaatcttaaaatcacatggcttaaaatttacgctaatcactattggattataatcttgtatatattttgtaataataggcttgtatttttctattgttattcctggagccattatcaaaatggtctgtcccttaaatttatcaacaagtttttcaacagttcctgaatcattaaccttcgttgaagaatattccagatataatttttgaactaaatcgtaatcatacctctgtctattttcctcatcaatgctggatataatatactttacatcacaattttgcaagcgatactttgatgtaagaaatattacattattaggatgtgctttgtatataccagccataaatgaaggaattgaatacccccactcattatcttttttatatggctcaatataacaatctattgcatctaatatagcatccgtattgtaatcataattttttttccgagccaaatagtctataattaattcggtattgagattacctgcacattttcccattccatttattgtagaatctataatgattttacgctcattatttgataattgtataatcctttgtgccattgcaaatgacatctgcatattattatgagaatgaaaatctatcgctatttcttttttcaaattatgatttacaacattccaaatataatctaaatcatctaaatacattgatccatatgtatctattatgccaaatgaaacaggattgatttcattagcaataccaatcagttccaacaattccgttgtcgtatatccatttgtaaaaacggtttgaacatacaagtcatatccttttttttgaatcattttcatttcggatataatatcatcacgatgctcgtaataattttttttggtaaagccataacgaatacctgttattcttttattatttctctcatccaaattatctatattatataagccgtaatcaacaaataaaacataccgctgatttccctctcctatattctctgcataatagtttgcttgagcaactgttccaaaaaaagtactatttccacaataattaatattatctcttaagaaaccaagttctatgatgtctatgtttgacttctttaaaaactttccaataccaataatttcattatcctgaaatttgcagtctattatccttccaccatcacgcaaggtacaatcaagaatctctatgtctttcatttactgttcctttccaaatattgttcaacaacttttgcaaactcaaaatcttccggctcgtcaatatcaacagcttccatctgatcaatactgcacataaatggttttttacctatacgctgatgtaaattgataaaaacatctttagtaaaaatataaaaagcccctgtttccatataaataggttctaaattttgtgtcgtaacaatatctttcatatcataattaaatggtacacctttataccaacaataatcctgtattctaacgcagctaaatgctgaatcatactccccacttagcactgcctctaatccttttattatagattcaggtcttgtaaatggctgggtaacatgtgtaagtacataaatatccgcatcaacatcttttacaaattgttctattatatccagtccttttacttcaaagccgtctaatgtcttgcttctttttaaaaagtttatgccttctggaatataatcacatattttttcatcgctgcaatatacatatttttcatctatttgtgaaatatctttaactgttttaaagatataatcacataacggtctcccattcaagtccttaatattttttcctggcagtctttgattatttaactttattggtataaatgatacaaccttcatgctcttttttacactccatccttttctcttcttacttatgtgcatataatacgatgtaatctgaattaccatgcatctcacaatctttcttccaaacagcatccaaaacgccagatacagcactgtccggaatctcagttcctggctttttttcttttatccatcccaacatatttgcaattccgtaacgctgataatattttatttctatataagaaaagccagtttcctctgccattgttctaagactttcctcggaaaaaatccataaatgctgtgtgctaaacaaaattttcttttcatatattgtcccaagcaatgctctcataatcggagcatctgtcggtgttccaataatagcagttcctccttctttaagtaaatccttgcactctttcaaaaaatcctgtggtttttcaacatgttcaatcacgtcaaacgaagttacaacatctaccttgtttttccacttctttaatgcttcagccgcataaggataagtgtaaaatccctttctatccataacattacgataaaattgtgatggttcaattgcaattacacttgacgatacgccattgatataatctaaaaatgcaccgcaaccacatcctatgtctgctgttactttatttctataaatttccgtcccagtatatctaaatttttctatcgtttctttatcatgtaaacgataaaatgtttcttcatcagttgaaccctctaatgattttctatattcagcactttcataatactgttccagattcattattggttcatgccacattactttacaatggtcacatttatatatttctacatctgaatcagtatagtgttctaaccttccatctctgattttatcattgtaaaccacagatattttttcatttccgcatattttacacttcattttgtacctctctatttttcaaacaacgagtcaaaatctgttctttcaaatatttccaacattccacctcttgttgcattataaatttctatattgttcatctcacaatatttacgtgctgcacaataggcattctccgccttatacacttctgacccattaggcagattataatttcccaggaaagctgcatgttcttcaccttttgatatcactccatcatgtacatttccattcttatcaattatttttgaaaatgtatgatcaataccaattagatatatctttttaaatcccatatatgctgccatctgtatcatggcatatgtagtagtagttccagaatatacctctagagaacaatcatctgaaaatgaaatactttcaatattttctggaagtttcattttcatgtaatacaaattatccaaatccttatcatcccgatatttatataaagatcctcctcctcttacaaatgctgcactacagttattcatcaaatttttcactaattcccttgactcaaatgtagttgaattagattctaaaaagaaataatattctggtctccattcagttttatcaaagcactgaaaaataagattacatgcaaatgtatgctcgttttttaatctctgtaaatcatctattttcaggcttggaccatttccgattataaaacagcgttctccattatgaatattctgaaatttttttattttttttgaatactgcgaaacattaataacttcatcctcaatcatagaaaaaattgaaacatccgatattgctattatttgttcgtcttttatccctgcaagtttcaattgtttataaacagcttcataagaacgcattgataatatatacataacattatcattacaacagatattttttccactatatacatttttcccattgtattgtttatttatatccacagaataattatcaaaatatccagaccattttatttttttttcatttaataatatgcccagataattaccatacacagatacgccccatatatatatttctttctcattgctattgtcgcatatatactttataagcaattcataactatcaaaaaacataaatatcctctctataaaaatattttaatttcttattccatatgactctttataaaaaaattaactattctatttagaaacatatatattcacaactctctgtcgtgtcataatttcaaattgattagttaaaacaaatcttcctgttttttctataacatcgtgagattttggcaatatatatataatccatatcttacgcgggcacctgttaagactttcacatatattattaattactttttcaaatacatctctgccaaatggatcaaacaagtaaaaccaattatacccatccagctcctcttttactaatgccgcatctccgtgataacaattcatttttttatcatttaattcattacacattttttcagcatttgatttaagtatttcataaacattatctacatactctacaccgccaacttgactaaaaccataatccaagaaagaaaaaagtgccgatcctttcccacatccaaaatcaaatattgcatcgttcttttgtggaatgcagtggcatttatccagaattgggaaaatttcttttggcgataaattaacacatggacgcatcccatccatagaatttgtaaaatctttcacttgtattggttcgactatatcatacccatgcattttctccaaatatctcataaattgtatatttgtatcactttcttttctattataagcaactccatatacaatttcatttatatcaaagtatgttttatttttaacatagccatgtgtttcaagacatgttcttatttcttctgtttccgctgtacataaccatacaacagcatttttaacatctttataatctaattcaaataatgaacttctaaataaaggatattcatatggtataatgttgctatattcttctgtaatcagatatcgaggttttatgctatgatagtagtctgcataccacgcaataaatcttcccgaatatccatacccataaataacaatcgtcttgtccatacatgaacacattaaattatccagcttatctctaaattcttttaattcttctaacatctgctctcctatcttaatgcccttttcaactgataaatcactctttccataatatcttttggtccaattgtaattcttaatctaagggcatctttatcagtaaataatcttataagcaatccgttttcttccatataagcccgcactcttccagcatctgcattatcaagctttataaaaataaaattcgactctgacttatatgcctttacccctggaattttatttaattcagtatagaaccactctctgactgaatttgtctcaaatttcatttttttgtaatattctgtgtctttaatcgctgccaccgctattttcctgctgatcccacatgccctgaacagtggtaagtccagacatatcgtacgtcttaatgggtaactgcataatccataaccaatacgtatgtcagcaagtccatagaattttgaaaaggttcttgttattactacattactatattgggtaatgatttttttctcaaacttattatcatcatttccatatccccaatatgcctcatctagcaaaataactgaattggtattttctcttatcactttttcaatatcattgtatgatattccacatccagtcggcatctgtggagatgttataataattaccttaggattattttctttagccttttgaagaagatcctctatattatactcatacgtatcttctttttcacatacctcgtatgtaatacattttgcaaatttggcatctgcaacgctcttataataactccagcccggtgatggaattaaaactatatcattctcattaagcaatatgcttcctattgatttaataacttctgctgaaccattatgtataaaaatattgttagatgaaattcctaatgatgaggataatgtctcaactaattcatcatttcttcccaaatcatataaatacaaatcttccattgtaatatttttcaatacttccagacatttaggagatggcttgaataaattctcatttaaatgaagccttccacttttctgtaccgttggtactgaatgatatgacttaacttccgaatattttgaaaacactttgataacttcattagactgatcaagattttcattcataaactcttcaaaagaattatcaaactgcttgaattcttctaatgtgtcaaattccaataccttgtttttttcacgttcaaccttttttaattttaattcatcaatatgttgaatatggaaatcatccattaacatatttcttgtattcatgtcattccattcttcattcatatatttcacaaatgtatcagaaaactttctgtcaaaaaaacagtcccctattgtataccacgcttttgcaccaccacgtttaatacttgttatataaccatctttatcttcttctaatacacaatattcatcgcagtattcttctgaatacacacatgaataatatggcgaatagacgtatttatgaaacacattatctgcatagtaattatcagaacataaaatataagaatttttcatataattctgtgctttatatagtgacgctatgttattgtatttatcataatcatcattgtgaattaaaataaccccatatttgtctctcaaatattgaaatttttcctgcataaacccagttacaattataatttccttaacaccagcttcctgtaactgtcgtatttctctttcaataagtatctcacctttaacacggaacaaccctttaggaagaacattagataaaggcatgcatcttgcactataaccagcagccataataattgcattatcaaccttgtatggtttcaatatatttaattcttcctcagtaagtaaatttccttctttattctctgccttatattgtaattttttaaattcttcgtaagtcataactactcctctccaaattcaatcaaagttgcaagatgctgtggttttcttttatctactggaggtggtgtcatataatcatcaccatacatgtatcttagaaaaccatctgtatccttcggtgcaaaagctaccatatcttcaaattttatttcttcataatctgtaagccatgaacgaagatatcctttactttcttgtttccaatgccagcctgttgtcctaacatattttgtttctattccagcatacttttgcgataatttatcatactctttggcaacgagtttcattggaattagtgcaagcaggttatatgctaattttttcaatatatttttttcatatctggcgccaacaatagaataaccaatttttcttgctataaaacttctaagattaaacatcgactttgaaagccctttttccggcatattatcgcatggaaaaatatctaaaaatatgccattcctgctttttatcatctcatgatcacttctaaaaaactttgtattattttttaggactctgccatactcccatcgatatcctggatcggtatgatatgtctgccagaaatatttctctccaaattcattctgacatacgtcacaaaacttatcataatcttttcttaacattctgatatctatatcatcatcccatggaatgaaacctccatatctgaccgcccccagcaatgttccgccatctaattcatagattatgtcatattttctacatattctatcaacctctttaagcatttctaattctacactctgtatctttttaaaagtctcatcattatattcaaagctcatattttacctcaatatttctctgtataatattatatttctaactctatctctttcccaccgataaaatcattatcaaaataaaatcctttaagaatatttttcgatatattacacataccgttcaacatattaaaaaataaaatatcttccaagctttctgttctatctgacattgattttatgcattcactgcaatttacagctaatattgtcttataaatactgatataatcattaataaagtcaactgcaccacaatttactttttccttaacattgaaatttttctggctctttctatcaggctggcatactgcatttcctctgtcatcaatatatctgatcataccatgcggagccgtaataaatgtctctatatacatattcttattacttgcaatacttttttctgcagtataatcatcaccatactgaaaacacccatccattgatatttcattgctataaacattatcttttgacaaacatgcataaaagcaatacccttttgtcttaattccagttaatcgttgcagatagtactgatttgttccataatatcccaaatcaactgttccataagataattccttttgcatatcaccatctgatgtaagataagcaagataattttttctttcttttttagcctgttccattattttatctttgtatggctgaatccactttaatatgttcttactatcccccactgcattaatctgtcggtcattatattccaatgtttcatctgtaacgattatctcaaatctagatttcatataatcagcaaatgttccgacataagggaaagctacaactctattaaagtcatcttcattctccatggttgctatatatataagtcttcttgatatcggaagataacaccagtcttgcttgtatccatcatctaataattctgtgacaattttgtaatttttttcaagaaaatatccatctctagcaaagaataataacttatctatttcatcttttcttgaattgtaataaagccatataagaaatttttcaagtaatggtccatagatacaatatccataactctcactatcgtcgaatgacactttccccttagtactgcataacgcaaatggactattaaacagatttgaaattactaatcctagacatatactgtctgataccgtattaacatatgatgccaattctgccatagatgaattcataagcatatctttagcgctcataatataatatgaatcaatatcatattttatagaattctcaatgtcacctagtttattgtcacctatatgcagacacttaacatccctgctgaacattgcagaatactctttccatattgtgcctgataccttatcatatttcttctcacacgatacccatatatgttcattatctggtggtgttattccacatttatctaatatgcaattaatatcatctaatgtataatacatatcgctcacaagataaacttctttccctgatgtcacacaatactcatataaatctgtaatatctcttctagcaatgcataaatccaaatctatatctttctccatcttcatgatatccgatatattctcatctgtgagattcatacacttctttatctgttcatatatttcgttaatatttgcatatggtccacattgtgcagcaacttgtgctcttatataggcaatttcacaatctaattttaattccgctcttaccttttctcctaacagtctgaatacatcttctggtgaaaaaatttttctcattatcaatgtatcaaatatatcaaatgaaacagtgtctgctctatctattttatcttttaactctttatatgaactttcccaatactcattttgttcataacttgtatcttcatctggcaaacaagctaatcttccatctgcataatacactggaactgtaacatcatttgcaattcttttgtatattatctcatagttagatgggtctgaattaataataattgcatctacataattctctacattctttatagatattactttaattccacataattcttttccaacattactttcatccctatccaaaattccagcaatattaaagtcagttatccctgggagaagcgttgcactacgccttcccattccatatattgcaattctcttgttttttatgctgctaaaattatgtctgaaattttcaatttctatatcatatttagacttccgttccatgtatataatccttctcatttagtatgtttcattgtctgatatttacatctgttctgctgcttttacaaattctgtattgtcattaccacaaccaccacatatcttacaaagcttcacaaatccttttgccatattaccattactgtgttctagtattgcttcttttgctctgtcatcatcatcaagtgttcttaaatcaatataatcatctgatacattttttaataactttgccttatcagcactccaagatacatgacaataataatactttccatcattaagcccatgaaatattggtccgcatgaaagcatatgttctcttactttatcaaaatcatacattctgttattaaccgggaatccaaaatcacaccatctaagagaacgatttactgaatatcttaaaccagcatcacttactatctttacagccgcatcaaatctttttttataatccactatatctgtgtagtcactgaaatcatatttaacattatatttttttgatatttctataagctgttcatctggtagtaatgttccattagtgataatcccaatattacctattctattaccatacctatcaccaatctgccttatcatgtctgcaagttcaccattaataagcggttctccaccaagaatttcatatgcaacaatataatccacatgtctaaacaacaattctaaattctctaatatatctttagctgtataatctacatgttccttataatatggcataaacatattacaatgcttacattttaaagtgcatcgtgatgttattgtactatgcacttccattaaacagacttttttcttataattccaaaaccactcagtaagaaactgctccattgagcaaaagtcttttcccgactttaatccaaatttttcaaggtcttccccaactaaagcagcatttctgttagctgtcataattactattttataatttttcaaatcattttttacatcatcaacatgttttactgatatgcctttaaattcacagttacatttctctttatcgctatctacaatgtatgcaatattaaaactactcttaaaaaaatctatgttatcatgagctacttttccaaacccatatataaccaattcacttatatatttccaatcatctgttaattcacttttcatatctatcacctaatgttttattcaatcttgtggcaatcaaaaagccctgcatacaaatgcagggctttacatatcaatcgtaattctatccatattaccgatattatatcaattaaagcgactccattcgcatgttgataataattcctgtatctcaatttaattatcatctataattcctaattataaataatatatcggttaattattgatacttcttaacctttcatagctgacttgttcatcagtcaatgtatttttatcctttaaatatattgtctattttttctgcactatcaagagctgtcatgtcatttgaaatttatacaattcatttatccttactcactctaaatacgcaatcccagactattaataataactttatcaaaatcatacattctgttattaaccaggaatccaaaatcgcaccatataagaaaacgatttactgattatcttaaaccaacatcttttaccattttcactgattcatcaaatcttttttataatcctctacatctgtgtaatcaacatgttccttataatatggcatgaacatatctcgcggcctcaactctcccctttatatactccccaacttcatgtatagtccgaagcacctcttcttttgttccatatgggaagctgtttacacaaggaaatgtctcaaagcttaaagtcccgtcaaatccgatctcagcaagtgccacagcaaaactctcccagtcagtaccgcataaaggactgctgccaaatgtataaggcatctgatgaagatctccatatgcatcattttcatgcatatgcaaaagcttcagacgactgccaaccttcctgatataatctgcaggctgtctgtgtacaagctggatatgtcctgtatcaagacatataccaaacctttcctcacctgccatcatatttaacatatcaacataaaatattgcgtcgtccgggtcagcacatgtgccttctgttattcgccctccaacactttcatagagattctcaacacatattctgacattgtgcttcttaagctccggtataagagatgagaaaaactgtacattcattgcctgttcagcctcaagtccgtacttatactgcatcttgaacggatgcatgactacccatggaatctcaaggaaaccggcaatctgaatgctctttggtattacaacattctgcatatactggcttatatcatcacgtcccagcacatacataggataaggagcatgcatctgtgacggcttaattccatatttattaaacatcttcttatactcgccaaagtacgcaagaatatcttcaatatctgcatcaaaaaatttattaatctttccaccatagacatctgaattctttaaaaatgtatcaagattaaaatcaaccatctcaaatcctacccgtgcaattattgcaacgccatcctcaattcccatctctggcagaattcctttagtctgtacacctacttttaccatttccattcctccaaatgtctatacaaaatatctgtcctgaaactcgctgtgttcaacacccatagccttaagctgcgctgatatcgcatcataatacatgcagcatataacaacattacgttcttgtgccggaacatcaagtattgctgacggagcctttacatcaaccccgcataccttagttccccatcgcatctttccattgtccactgcaaaatacggcggatatttatctccaagcacatccatataatcccatagcatctgtcctgcaccaaacagaataagctttttatcaggcttgtttaacactctttcaacaaatgtaaactgtccctgccattctttaacaattgcattcagcatacgcacatattgtgtctgcagtacttctggaactcttgcaaatgttccgctattatcgaatatcatccatcctgagaattcaatcttaataagtgctccaataatatgataccagtctgtaataagatctcctcttcctcttgtaaatgtaaaaggcatctgtttttcattgtacacaccgccattatcattagcatgtatcatgcaaagatattcactgcactggtcaatctggcttctcacattcttggcaagcagattactatatccaacatttatagatataccaactatagctgtatcacacagcctgttacagtattcagcaattgatttcaatgaagatatatcagaatatgcgctattaagatatccagtttcatcacttccattgcagccattctctatgaataccggaatcctgtaatctgtcatcatcatagaacactcttccacaacattttcaagaattcctgcttcacaattcatggtatcaagtactatataatttccctgatattttctgcagttttccagaagctcatacatcttatccggagtcagttttgcaagaggataagaaaatcctgaaaccttaagtacccgtgaatctccctctttcttcttataagtcgggagttcatttttttctataatctcataaggtatttctgcatatgaaaatccgccatctgcaattgcttcaagctttaatccgtcacttaactgtacgcctgctaacataattatctcctgttctcacaatatctctccggcacattagtaaatatatccgttgcaccaagtctgtagtattctcttaaatccatatccggtaatgtcctgagctgtccatacaaaggctcgcttccattccacatacgcaccctcagtcctgcatcctttatagcttccacatcgctcttattgacaggcattcccaattgtgcaggatgaattgtcatgcctccatatttaatgataccatccatacagcggtgataatcacccgccagatatgccacatctgcgtcatctttaagctgtcttacaagccctattgaatcatgattaaatgatgagtacacaacataatcctcaagattaaattctgaaaccatatcaataaccttctgctccatgccttcatatcttatttcactattcttaagctcaatattaagacgaagacccttgcccttgcaatatggtgcaagcaattcaaatgtttcccttaatgtaggaattctatgaatttcatcatcaccggatatagataactgtttcagttcatttattgtatattcctgtacatagccggttccatctgtggttctgtcaactctttcatcatgtattaccacaatttcattatcttttgtaagctgcacatcaaattcaattccggtaatgccttctaattccgccgcttttttaaacgcaagaagtgtattctccggattcatcatgctgcatcctctgtacgcccatataccaactctctttaaggcttctgtatccacagtctgcttaacctctccgcggtttgcaagaaattgctctatcataccagaaagccatatactttcttcatcagttatcttctttacagttcccggattgttaatacattttacaaatgcttctatttcatatcgcaatccaccaccagagaattcttcctgatacacttcaacctgattaggattctcatgatgaacttctattctcttagtaagccaccatggtgatggaactcttatataaccatcatccccagccacaataagttcgccttccgtcttaactccaagaccggtctttatcgtagcaacaccatcatcataagtcatcatcatcttagtgtacgaatctgttccaagtggactttctaccgaatatgtatgaacatcttttacctctgtgccaagcagcttcataactggaagaagacaataacttgcaagctcagtaaaacttcctcctgacgctccccacatttctcttcctgctgccacacttatcttagaaaatgcagcttcaacatctctcacttttcctattacgccactcttaacaatatcaagtattcgttcaaatcctgcacaatatgctgtttttattgcctccatgcatacaagctttttatcatcagccaccgaaagcatctgttgtatgtccgatttattcaatcccataggcttctcacataaaacatgctttcccttttccaacgccattcttatatattccgtatgcatctcatgaggtgtagcaatatacactgcatcaactgcatcaaagaaagcttccgaatcatctgtaagaatcatcggaccatctatatcaatattgttgttctttgcaaaccataacacactctcaagatgaggattatatattgctgaaacatttataccacttacatatctgctttcttcaaggaatctggatgctattcttccggttcctataattccaacattaaccattgtgcattctgctttctttaccttagcatgaataagcctgataacttcttcagtagtaaattctgtattaaactcctgctgcataaccagtcttaattcttcaatctgacttttataaaatggataatcatgtgaacttccaacatttctcggtgtcatatactctttaccgtactttatctgcaataatccatcatagccttctggtaccggaatcgttgtattttcaaatggcagttcacatatatcttcataccattctctttttgcatgataatcccagccttctgcaaagtctatcattgagcatacttctgctgaattctcatcctgatagagtgaacatacaatatcatatattttctttaattcgtgttttaatctgttattatagttgactggaatgccaaatgttttttctatctttttcataagtcccagcacttcagtaccatatgatcctttctccggaacactctctgctgttctgagcagaaatcttaagctttctatctgtttatccaaagcctttttgtcatcagttatattatcaaccggaaatatatcgattcccacaacatatggacagccatgaaacttctcaagaaaatcaggctcaaagcatatatgccttccattaattatccttgccttaatagtatcatcttcaggatcattatacacgctcttaatttcataatatttctcaagaagagctggtgcctcagataaaaatctcatataatccttacgcagcattgctatatccatatcatcatcccatggtatgaatccatgatgtcttactgcaccaagtaaagttccccagtcagcaaaaaatttaattccaatgattccgcatacacgcttaacttcttccagtacttcaagctgtgctgcccatgcacgcttcatatcctctgtaatcacgaatccttctctagtttcttctctaaaatacccatcatcaaaaagcatatctgtctcctgttacatttatcttctcttctgcttcatatacgcttcagtcacttcagccatagctattgcttcctctgctgtaagcttatatccgttcttatctattccattaattttagatacaaaatcacttatctcgtatctgaagccatcaccctgaaatacaggttcatatacttcgaccttggatgaatcctcgaaatgtacctcaaatcttcttgtaagccaccatggtgatggagcaagtatatatcctttagtacccgcaactacaagctgaccttctgatttaactgccactccgttctttgacagagccattgcattgtcataagacagatatactttggtataaaggtcaactccattttcatcatatattgtatcaaaatgtatgtccttgtaatctgttccgagcagcttgataactggaagaagggtataacttccgaattcaaggaacgcaccaccatatgctgcatctgtccgttctcttgaattatcgttggcaagtcttgtaaagcatgcttccacatcgcatactttaccgattttacctgactgtaccatattgataagctgcccaaatcccggacaatatgctgtctttacagcttccataagcacaagcccattatccatggcatactgataaagcccctgtgcttctcttttagtaaatgctgcaggcttctcacacaatacgtgcttcccattcgctaatgcttttctcgcataatcatagtgtgtttcattcggtgatgctatatatacagcatcaacctgttcaagaaattcctcatattctccactataattaggaatatcatgtctgttactgaaagcctgtgctctctgattttgaggattatatgtacatgctatattaataccacttacatacttggcctctgatatgaatcgtggtgcaattcttcctgttcccacaattcctacattaacaatcttgaacttattctttctttccaatgttgatgatatatccggcgtgcgttctagatagacaacctcgcagaactgctttaaataatcaaatgttcctatccagtctgaacctacagtgaatatatcaacaccatatctctgtatgtcttctatcttctgtccgtcatgatcctcaactataatctcatcagcaaagcctgtttttctgacattctcaattctttccattattgaatcaacaacattgacttttcctctcgcctcatcaaaatgttctgtggtaacaccgacaataaggtaatcacctaatgccttagccctctgtaaaagcttataatgtccttcatgaaataaatcatatgtaccataagtaattaccttcttcatcttctagttgcctccaatatctcctgcttctatcttagctgcccattcggatcctgtttcttccccaaagaattctgtaagcttttttatatacaattcccttattccttctgactggactattactctgtctgaatatacaactcccggcatcgtgacatattcattcatattagtatatgctctcatatcattctcatctatttcatctgttctgaaatatggaatgtaggtaagtctcagtgtatgcgaagcaagattatatgaataaaataccggatccgttgttccagcagagttatagttatcatatggatactgaaatactatttcgtctggatattcttccagataattatattcctctattggtgtaattgtaacataatcagggtaacttccgctatctgtatatttttcaaaagttccgttaacagttttgtaataatatggaacgctctgaactataactctagtattctcttccccgcaatattgcttatatatattatccagcatattccagttttccgctttataagataagaaaagcactgtcttatatgtagcttcattaaaatcctttattatctttcttgcctttcgcactacactgacacgctcttcataatcgcaatattctttatatgtgtccttaaattcattgggttctaccccatctactttgtaatgttctttttgtttttcaaagaatggataattatgagtaccccagttgtgaactggcaccatataatctccatattttatctttaatattttatcatattctttaggtacaggtatcattgtattttcaaaaggaacccttatttcttctttataatacctctttggaaacctataattcttattcccaagccatacatgcataagtgtaatataatcagcttcgttctctgtatataatccgctcagcttatcaactaatattagaagctgctgtgctatactcttattcctgtctatagtaactccacataattcttccacctgtcttaagcgaaattctaattctgccggagctttttccaaattaatttcattacatttattttcaatatttcttgccagtttttcaactgtccatactatatctattaaatcacactgaaacttatcatcttcttcatctgcagctatataatcaagtggaaatatatctattcctgcaacatatggaaatccatgatatttttcaaggtgaatcccgtcacaattaatatttcgtccgttaataattctcgctattgcattatcattatctgcatccgtattcatgtcgaatatctcatagccctctggcataatatcctttgcaacttttaagaatctgctatagtctggccttttcatacatatatccatatcgtcatcccatggtatgaatccatgatgtcttatagcgccaagaagtgttccccattctgcaaaatactgtattccgttctccctgcatgccttatctacatcactaagcacttcaagctgtgcagcccatgcatgctttatatctgaagttacataaaatccttctcttacttcagcttcaaaatagttattgtcaaactccat

SEQ ID NO: 1163 - DNA, 31172 bp, unidentified
  source 1..31172: mol_type = unassigned DNA
gcatttttcgcaaaatttagcctttgtttgttactgttcactggtaacgttccgcgaggcgttttttgtgaacaaagttcacagaaaacccgagaattaagtttgcgcagcaaacgctacttcttgtgcttgtcacaagaaggttcgtctttctgtgcatcgcgaagcgcgttactgtgaacggagtgaacagtaacctttgtttaatgtcttagagcgtgtttattaccttcttgcaatagtcgcaatatcaatcaggctcagcttgttagcatctgtgttttccagacttgttaccagagcctctgcagtatcaaggctggtaagaacatttacacctgtctcaatagcattacgtctgatcacgaaaccatccttctgatgctcaacaccctgagatgggatatcaataaccacatcaatcttatgaccaaggatcaagtccataaggttcggtgcaggctgctccagcttgttggtacggatcaccttaacaccatgctctttcagagtattggctgttcctcttgtggcatagatacggtatccaagtgcctcaaatctcttagcgatcggtacagcgtcctcctgctcttccggtcttacagtcataatcatgttcttatacttcggtagacggattccagctccaaggaatgctttgtaaagagcctcattgaaggtctctgcaataccaaggcactcaccggtagacttcatctccggtccaaggctgatatcagcgccgcggatcttctcgaaggagaataccggcatcttgatggcaatgtgttttgcctctggctgaagaccaggctcatagcccatatctttcagtttatatccaaggattaccttggttgccagcggtacaatcgggattccggtaactttgctgatgtaaggtacggtacggctggaacgtggattaacctcgattacatatacatcatccccaagaacgatgaactggatattgatcatacccactacatgaagtgctcttgcaagacgtctggtgtactctgcaatagtctctttggctttctcgctgatggttcttgccggatatacggaaatactgtcaccagagtggattccggcacgctcaatgtgctccataataccaggaatcagaatgtcctcgccatcgcaaactgcatcaacctcgatttcttttcccatcaggtacttatcaacaaggatcggatgctcctgtgcgatctggttgatcacaccaatgtactcttccacatcctcatcgcttacagcaattctcataccctgtccgccaagtacgtaggaaggacgaaccagaaccggatagcccagctcatttgctgctttcttcgcctcttctgcggtaaatacagtgtgtcccttcggtctcggaatctgacatttctccaggatttcatcgaacagctcacggtcctcagcagcgtctacattctcagcagatgttccaaggatctttacgcccatctttgtaagagcttctgtcagcttgatggcggtctgtccaccgaactgtacaacagctccgtccggtttctcaatatttacaatattctcaacatcttccggtgtaagaggctcgaaatacagtttatctgcaatatcaaagtctgtactaactgtctctgggttgttgttgataatgatagtttcatatccttctttcgcaaaagcccaggtacagtgtacagagcagaagtcaaactcaataccctgtccaatacggatcgggccggagccaagtaccaggatctttttcttatccggtgtggcaattgcctcattctcagtgccttcatcaccatatacagaatagtaatatggagttgcagctgcaaactctgctgcacaggtatctaccatcttataagcagccttgataccgtaatctgcacgaagatctttgatctcttcttctgttttgcctgtaagacgggcaatgatgtagtccgggaactccatacgttttgcttccagaagaagctctttggtaagctttctgttcttcagggcattttccattccaaccaggattgccagcttgtcaatgaaccagatatcaatctgagtgatgtcatgaagcatggactgcggcataccacggcggattgcctctgcgattttccagattctgcggtcatctacgattgccagctcagcaagcagctcctcgtctgtaagctgggtaaaatcataggacataaggctgtccacatgctgctccagggagcggattgccttcataagagcaccctcaaagttatggcagatactcataacctcaccggtagctttcatctgagtggtaagggttctcttagctgtgataaatttatcaaatggaagtctcgggatcttaacaacacagtagtcaagcattggctcaaagcttgcgtatgtttttccggtgatggcattcgggatctcatccagtgtataaccaagtgcgatcttcgcagcaacctttgcaatcggataaccggtagccttacttgcaagtgcagaggaacggcttacacgagggttaacctcaatgacacagtattcgaagctgtctggtttcagtgcgtactgaacgttacatccgcctgtgattccaagctctgtgataatgttcagggcagaggtacggagcatctggtactctttgtctccaagagtctgggacggagcaactacgatggagtctcctgtgtggacaccaaccgggtcaatgttctccatattgcagacagtgatgcagtttcctgcactgtcacgcattacctcatactcaatttctttccagcctgcgatacagcgctctaccagaacctctccaacacgggaaagacgaagaccattctccagaatctcacgaagctcgtattcattgtgggcaattccgccgccgcttccgccaagggtgtaagcaggacgaagaacaaccggatagccaatggtattggtaaatgcaagaccatcctccaccgtggtaacaaccttggaagctgcaaccggctcgccgattttctccatggtatctttgaattcctgacgatcctcagctttcttaatggtctgggctgtagtaccgatcagtcttacattatgttctttcaggaagcctttctcatccagctccatggcaaggttcagacctgcctgaccgcccagggtaggaagaacgctgtctggcttctctttcaggatcagctgctctaccacttctacggtaagaggctcaatgtaaacacggtctgcaatatctttatctgtcatgattgtagccggattggagttcagaagaacaacctccagaccttcttctttcagggaacggcaggcctgtgttcctgcgtagtcaaactctgctgcctggccgatgatgatcggacctgaaccaataacaagtacttttttaatgtctttatttcttggcattatttatttcctcccatcatatccataaatctgtcaaacaggtaactggaatcctgcggtcccgggcatgcctccggatggaactgtacagtgaaaatattctttccaacgtatgccattccttcgtttgttccgtcatttacgtttacaaatgcaggatgagcaatgtttttctcctcaaggtccttggcatctactacgtagccatgattctgggaagagatgtaaactctgcctgttgtaaggtcttttaccggatggtttccaccgcggtgaccatatttcatcttataggtatctccgcctgttgcaagtgccatcagctgatgtccaagacagattgcaaaaatcggaacatcggaatcgtaaagtttctttacttctttaataatagaagtgcattctttcgggtctccagggccattgctgagcatgattccgtctggatgatctccaaggatctcctctgccggtgtaagagccgggtaaatagttacctgacatccgcgcttattcagggaacaggcaatgttgcgctttgcaccaaaatccataagtgcaaccttcggaccatttccaggaaggatttctttctcacggcaggttactttttccactactttaccagttgtatatgcttttaacttggggagaattgcgtttaagtcataattttcatccactgtgatcataccgttcatggtacctttctcacggaggatcttggtaagagctctggtgtcgattcctgcgattccaggaatatcatgcttggtcaagaaatgctgaatggtgtcaacgcttctgaaattgcttggaacacgggataattcacgtacgataaatgcgtcgatccacggtctggtggattcctggtcatcataacagattccataatttcctattaatggataggtcatgcataccgcctgtcctgcgtaagacgggtctgtcattacttccagataaccggtcatggaagtattaaaaacaatctcactgatgacttcccttgcagaaccaatgctggttcctgtaaatacatggccatcttctaatatcagaaatgctttcatacaatctccctttcttatgtcattttctttcttattttatcctaaatcttcaagattgtatcatagcaaaatgcttttttcaacaaaatatgagcaaaaaaaaattctgttgtgctgaaaaaaattgcacaacagaaaaaagctactggatccgagtctgaataaaagagacatcctgtgcctcacagccaaccttatacgcaactctggcattcgtaacaaaagaaaaaaaataatgcaggagatgggacttgaacccacacgatcttgcgaccacaggcacctgaagcctgcgcgtctgccaattccgccactcctgcatttcttatgtttcaatcgctctctcgcgactgcttgattataatacaacacattcagtcaaatgtcaacactaattttcaaaaaaatttgaaaaatttaaaaaatatatttttgtatcctttaggattccgacagagatttgttcttagtccattttggtctttttacctattccaggggaaccgcaatttataatgaaatcaaccgttatccacctgtggctgacggctgatactatttatacttttacaccagagaaatgaaatatgacgtacaaaagaatcagagagctgcgggaagatcatgatctgacacagaaatacatggctcactatctcaatgtgatccagcgtacctactcacgttatgaacgaggggaaagaatcattcctcctgatgtcttatgcaaaattgcagacttctataatgtaagtgtagattatctgctggaacgcacagatacaaagcagccttatcctccctcactgctctccagaaaaacaaaagacacctagcgcactgtgccaggtgtcttttgttttctgtctcagattattttttcctatatgaaaataaatttcctgctgcccacagaatggtacctgcagcaatacatacgtcagacagattaaatacgatcttacgaatttctttgttcttcacattcaggctcacataatctgtaacatatcctttatttcgacggtctgtgtagttggacattccaccacccaggatcatggcaagaccggctctgctaagcttatttccgccgtggagaagctggtgccagtattctcctgccacacagcccataccggctgctgcaagctcctgacaattctccctgccgattttcaccttaccaagaatcttatctttattgtgacagttccgaaggagcagtctgcctcccagcacttcttctttgcttccctgaaggcgggtactgtcaatatgttcttttatcttataatccagcagaaagattccgccggcaattgttagcgaaagcatacatgcagcctccttatttaccaggaaaatcctgaccacttttctcagcttctgttgaggccttttcttcctctgcacctgcctcattctctgcctgcttctcttctgtctcttctacaggttctgcagtctcagtgtccaccacatcgccctcagctttctctggttccggagtcgggcatacagagccacagtatggacaaaaggagacacttctgtctacagcttttccacatgccggacagattttccgtcccttcatctccgctgctgcatccttatatccgtcaataatatccagatgctgctcaatctcttcgcagaaccctttaagagcttcttctacttctgcaccttctttgtacttctcaaagatcacatttccaatgtctgctttcagtttctgtaccatctgctcttcactggaaatcttgcttctgatcttctgcgcctcataaagctgaccggctttttttccaagatccttggttgtccttgtaattgtgtcacttaactcgtcaaaaaaatcgcgtgccataataccatctcctttacatataaaaagtgttgtaactatttagtacttttacggctaaaagctgtctcctgaacagttgcaaagtgatgaaacacctgtttccctgtctactgagccatcccgatcaggggaatttcctgtccgcgaagcaggattctcggaccgcctgtaccttcaatatattctctggtaatgatcacctgtccaatactgtcatctttcggaatctcatacatgatatccagcatatattcctccagaatggcgcgaagacctctggctccagtatgcttctccagtgccttggccgcaatcgcgtgaagcgcatcctcctcataatccagcttcacctcatccagggcaaggagcttctgatactgtttcaaaattgcattcttcggttccttcaggatctgcactaacatatcctcattcagtccgtccagtgtatatataatcggcagacgtcctataaattccggaatcatgccaaatgcacggatatcatctactgttaccttctccagaatatgtggatcattgtcatatttgtccttcaggtctgcgtaaaagccgatagatgcctgcttattcagtctctccttgataatattctccagatccgggaatgcccctccacagataaacagaatatttctggtatttaccgttaccataggaaccatggcatttttgctgttggctccgaccggcacctctacctcgcttccctccagaagcttcaaaagtccctgctgaaccgcttcaccgcttacatcacgctgattggtgttctttttcttggccagcttgtcaatctcatcaataaagacaatcccatgctctgctttctccacatcattatctgctgcagcaagaagcttggagatcacactctcaatatcgtcaccaatatagcctgcctctgtaagagaagtagcatctgcaatagccagcggcacgtccagaagtctggcaagagtttttaccaggtaggtctttccacatccggtaggtccgatcatcagcatattggacttctctatctcaatctcatccatagtgtctgtagccacacgcttataatgattatagacagcaacagacattactttcttggctctctcctgaccaattacatattcgtcaaggcttgccttgatcttatgtggtgccgggatcttcttaagatcaatctctggcctggcatcttcttttttcttctttactttcttcggacggggaattgcatcctgaatactgcccagattgatcatactcacattaggcatattaagaagatcgttcagattcagtccgttattcatctgctgggtcatggtgtcaaagcttttctgaatacaatcattacagatatgtatattgttaggaagctcgatcattttgcctgcctggctctccggacgatgacagagaaaacagaatttctcataatcgctgtcatcttcgtgatcatcgttcttctctgttatatcgccatcgatgatttcgtctttttcatcgtcaaaatgttcagtcatataattatttcctttcctgctgctgttatcaggctgaccagcagtctttcctatcttatgtaaaaatcatttttgttttcttattgtaccatacttttctctgatttagaaattaactttttataaaatgtgaaaaggggagccttatcagctccccttgcatattactgattaccatccggtcttgcactcaatgtaacagttactgtcgattcctcatactctccgttatttaaccgtgccacctcaatttcgatttcttcaccagctgaataatactgaagcttatcgttgatatcagccttacttgaaaccttctggccatccagcttggtaataatatcgcttttctggattccggcattatctgctgcctctcccggatacacatccataacaaatgcaccagatggcatattatacatctggattgcttctctggaaagatcggcgaatttaactcccagatagccaatctgtgactcatctgaaactttatcccttgtcttacgattcataagttcttccagaatgggctgtgccttggaaatcggaatggcatatccggttccctctatactgcttgatgcaattttggcacagttaattccaatcaattctccctgcatatttaaaagggcaccaccactgttgccaggattgattgctgcatctgtctggatcagctcctcataagtattggaatcggactgaacagtgcgatccagggcacttacccagccagatgttacagtctgaccataaccaagtgcattaccaatggcaaccacctgctcaccaacagcaagatcatccgaattgccaagctgggcaattttaatctggctcatggtttcttccggaatgtcacttttttcaactgcaatcaccgcaaggtctgtatcctcgtcagttccttttatctttgcggaaactgcaccatcaatattcaagtctccatttccatttatataattctcagtttcctgttctgcacttaccacatcacttccgataaagcagacactcagtgtagtagcgccctccactacatgattgttggtagcaatgagaagttcatcatcattctctccgacaataataccagaaccgcttcctgtactgggatattccattccatagccgaaaaagctgcgaatttcctgcatgcttactgaagtgattgccacgactgagggcattgcagcctgggcaacccctgcaacgggacctttttcatttgctacgatttctgcattgatgccttcgcctgcatctgtgctttcttctgccgtggtactggcagatgctgaagaagtaagtgtctctgcagaccctactgcagtctgagtttctttcttaaaatatttatccgacaccatattcactgcctgaaataccagacctgccaccagaccaaaaatcacagccagcgtaatagtatttcctgctttccttccaaaaccggaagatgctgccttatcattatgaagtctgtgatgtcttcctttctttttttcctcaggcttcttctcctgttcatcaacctgataatgcgcatatctgggttccgaagattgggactcaaaaccgctgtctttggatgaatttccggaagtatctgaattgttgctggaagcgtaataatttccattgtctgtgcttcctgcaccatctgaatttctgctgctggtatatttgtaatgataagttacattttcattcaattcatcttcgggggccgctgtctgatccgatgcagccgatccggattcatctgtattctctggctgttgggagctgccatccgttttctctggctcctgtccccaattccattcatcactcattttctgctcccttctatgttcataaacagtgctgctgttcacgttggaatctgcagcattctgtaacattttcttttatttatgatacaagtttagcaagcaattgtgttgaaaatgtgatagattcattaagaaaaggtgacacgaaaaaaagtgtcacctttcatagccacagtccctattcacgaagtgcataactgtaaaaacactgaacagttactcgtttttccaatattcacggttcatagtacaaaacaaaatcacctttttcggcagctttttatatctttttccaagaaaatatcccatatatttgaagccactttgccctgccagcttgggaaccagccagatatgccctgtttttataagataagccaggctctttttcacaaggcgaagtccctctccctctgatggtactccctcaaaaatctccggatgatctgcctgggaaacacccagatcaaaattccggtgaaactgctgtctgcatgaataattgtgtgaatggatcacacaggcatctgcagcataggcaattccatatccccgctttgccatagttcctgcataaatcatgtcttcattaaaaatagctttttttacaaaaccgccaatttcctcataaatacttttcttataagctgcacacacattggagcaaaaataagtttttattccatatatgccagtatctttttcccattttatagaagaagtttccggataattaaatcttctggtgtatttttccaggtaagcacagtcctcccgagccagctgtcttgcgtaggcagctccaactttggaattttcctgcagtggacggatcagatttccaatcagatttctgtctgccggaactgcatcctgagtcataaataccataatatctgaatcagacagtcttgctccccggcatctggttccaccgtggtcaaaatccgcctttttcaaatgtaccacgtccacttttggaaattttttctcccaggccgtgttccagaatttctcttctgtattcataacaagaattttttccactggataattctgtgtggaaagagaatccaacaacttctcaaattcttttcccggacggtatgcaggaataattacgtcaactgtttccatagtatctctcctctttcaggttctgcacgaataaatatactttcgcaatatggtaacaatgctggcagagcgcacatccttttcgcgaaaaagggaccacttcctttcggatggtccctttaaattttcaatcatggaatatttatctactgatcaatatccgcttccatcttcgaaaccgccatcgccggagctgtctccactataatctccgccgctgtagtctcctccattatcgtaactgcttccagaatcacttccactgtcataactgccatcgctataatcgccgctatcgtctccactataatcgtttccgctgtcatagctattgtcgtagctgttatcatagctattgtcgtaatcgcttccaccataatcgttgtaatcatagtttccgcttccgtcaccctgccatacaatatcagaagaatttcctgcttcattacttgcaatcggagactggtcaaccaaggtatctgcaccgcctacaagctcaatgatccgggcattcgcctccacaatgttctgtgacggctggtaattctcgtcagcaccatacagaaacttatgaagctcctttacattatcctccagcgtgtctgcaacaaccatgctggccttcttcacatccgcaaatttgtacttggctgggaaaccggtagtatctgcaatgttataccccatcagcgtcggaatcaggttcagaatctcagtcttcgtgatggatgtggaaatcataggaaatacctcgtccataatattgaaaatggtggtaattcctgctgcctttgctttgtcaaccatcattccgatcacacggcgctgacgctcagtacgtcccatatccatgcttgcagtgtaacggatacgacagtaagaaactgactgtacaccattcagatggtatgttccaaggatttcctcctcgttctccggcttgggatccggcagttctactggcgtgtagcttttgccggtctcctgggaagtttctatacaatagtcattcataaacaccatttccgcataggaaagaggaatatcaagaccgccaagtgcatctattgcagctaccattgcattaaaattaacagttacgtaatccgtaattttcaggtcaagcatggtattcagcatggaaatggcctgttccggaccaccatatgcgtaagcagcatttgccttggtataagtatcatttccaatatccagaagagtatcacgatatacggaagcaagcttcacctctttggtatcattattaatacttgcaatgataatggtatcactgttctgtgcatcaagcgcagcattcttggaacgctggtcgattccgaaaagtgcataagttgtatagccagacatctgtggtgctgtcacattcgtaacaatcttgctctcatccagctgaggtgtctcaatcttgttcaatctggaatcaatctgtccatatacatacaatccgccaataaacagcaaaagacagataatttccacaataaacaaagcagtcctcttttttctaccaggtcttgccatttttctttcctttctcaatacgcattcttattaatgaatcctttaaagatcgtcataaacattatcttgatatcaagccctacagtccagttctcgatatagtaaagatcacactcaatcctcttgcggatggaagtgtcacctctgtatccgtttacctgtgcccatccggtcagcccgggtcttacctggtgcttcaccatatatctcggaatctcttcacggaacttttccacaaaaaatggtctctcaggtcttggccctaccagactcatatctccctttaaaatattaaaaagctggggaagttcatcaaggctggttcttcgcataaatctgccgattgctgtaaccctgggatcattttttactgtccatgctttcttctcctctgcctccggctgaatctccatagaacggaatttatacatccagaaagtctgattatggaggcccacacgttcctgccgatagatcagcggaccaggagaagtgagctttatcagcgcacacaataccagcatgatcggcgacgccacaatgattccaataatggagccacaaatatccattattctttttatcatggcattaaaagtattactaaggggaacataccggatattgatcaccggaagtcccagaatatcctctgtatatggtttcgtaggaataatcttattataatccggaataaattttgtatgcactcctgatttctcacaaagtgctacaatctcctccagtcggtaatattcacttaatcccagtgtaatcgcaatctcgtcaagcctgctctccggcaggatcacgttcagattggcaattcttccgatcaccttgacgcctttatacatggtacctgcagtaatattgtcatccagaatgcctcttaccacatatccccactgagggttctgctgaatgcggtcaatatactcttctgctgcccggctgtacccaaccagtactacctgtttctggttcagtcctttctttcgcattttgcgcaggctgtagaaaatgaacattcttgctccccagcttgccacaatgcagattccgtaaaacatatacagtacagaacgggaaatatcgccttcttcaatggtatacaaaataaatgtagtgatcagaataccaagagaattggcttttacaatattagacagcacaagacgtcttccctgcatccgcattggttcatacagtgaaaacgcatgatacagcagaatatatgccggcaggataaataccagggcagacatatactgctggaagcttctggcccggacagcatttgctgcaaaaggtccgataaatctcagcgcccaggcaaacatataagataacgtaattacacaggcatctataacgacatggagccgactgaagttcttctgattatctttaatcaatctctgccacctctgcccttcttcacatgttgccgggtctgtcactcacagcaaccttcacaaacctgttcctgctgcgcgtttcatccacatctcacgctttagagcgtgtttgaaaaaggctttctgcaagatgtgcgtcacaatttgtgggagattttgtccggatgagggcgtcgtagcgggctacggcaaccgaattcgggcaaaatataccgcaaagtggggcgtgcagattgcgggaatgatttttcaaacaggctctaaagcctttttccaacactctccggtctgtgacttcctctatcttataatagataaaacagaattgcaataaattcttcatacattaacacgaaaaatagttacgaaataataacgaatcacttctgcacaaactttttataccataaatctgtaaattatattccaccacaattccagctggattcttgcatatcttccaagatttctcatgtggaacttcacttttttatttctgcggctgatctggaacccatttttgattcctgccacatactccctgcccattcccttctgggaaaaaaacaggatcttcatgccaaagcccggcaccagaaaaggaagattcaaaataatctgaagaaccggcatatttttgtagatcagataaatattatttcttgaagaatatctggtcttaaactgattgtatctggatccgcttgttccgctgcctacatgatagaccagtgcagctggcacataccagttctcatatccaaagatcctggcacgatagcccacatcaatatcttccagatatgcaaaatgctcttcatcaaaatatccgattttctcaaaaaccttcttacggtaaatagctgcgccagcgcatgaagcaaatatccgcccttccttctcaaaggaatgaatatcctttcctttgccccgggcatatgcccagccaagagcagaataataatttcctgcatcatccagtttattccggtcatgataacagatcatccttgcactgcaagagaaggccttcttatgacgctttatagctgccagcatttcccctacaaaattcttatctacttctgtatcgttattcaaaaggagcacataaggtgtccgtgatgcataaatcccctcatttacagctcttgaaaagccgaaattatctggcagctccacaatgtgtacccagggaaagttccccattacaaaggcaacgcttccatctgaggatccattgtccaccagaatggtctcaaaattctgaaacgcctgctgctccaggcttgaaagcacgccctccagatatgccatcccattataattgggaataatgactgatacttcctgcataatgtcttcttagtcttcctcctttttgccggtcatgcccggaagtggtcttaaagaataattccacttggtcagggaaagattcttattataattgggatcaccgttcttcagaatatcgatccagttacatctcatatattcgatttcccgctggaaacgtctgactttcacctcattgttctctgctccgcgggtcttggactccatgtggtaaagccttgcataaggatcataaaccaccagataacctgctttcgtagtcttcagacacagatccacatcgttaaaagcaactgcaagttcctctgtgaagccgcccactttatcaaaagcactgcgcttcatcatcatacaggctgcagttacagcgctcatatcctgtaaaacagacgccttgtggagatatccggtacgatccgcaggcatatccacaaacatatgacctgcaattccaccaattccaatcacacagccagcatgctggatagtattgtccggatagatcagtttcacgcctactgctcccacttctcttcgctgacacacacccagcatttctcccatccagtcctctgtaatgaccgttacatcattattcagaaaaaggagatattcacctctggcatttttgaccccaaagttgttgatcgcggaatagttgaattcctttttccagcagatcagatggattctgggatcctctgaaatcttcctgtaataatcgaaaatctcatctgtagtgctgttattctccacgatgatgatctcataattgtcgtagagtgtgttcttcttgatagattccaggcatttctccagagtttccttctcgtctttattgggaatgataatggaaacaagcggatgtccctgtaccgggtatttcactctgtaaaatccaagatccggagtatggcttacagtaccttttactccagtcctctcaagatgtgcctcgatagcgcgcttgcctgcttcaaaagcgtacatcttacttgcaggattatcagcagtagatgccttatgggtacgccaatgatacaaaatctccggtacatgcaccacttccctggctttttccacacagcggaaaataaaatcatagtcctgtgctccgtcaaattccctgcggaatccgcccacttcttctaccagctgccgccgcacgacaaaaaagtgacagatatagttattggaacgaagcagatcaatattaaaatccggcttcagatgtggctgaaaatgctcgtccagttcagcagtcactttatcctcatctgtgtatactgcatccccgtgctcatgctggttcagtgcattcacaacctcgtaaagagcatttggagcaagaagatcatcatgatccagaagccccacaaattctccctttgccatggcaaatgcagcattggtgttctctgcaatccctttattctcagtgagttcctgccagcgtactctcctgtccctgctgctgtattcttccagcacttttctcatggactgatcttccggacttccattggcaatgcaaagctcccagtcctcataggtctgtgcttccagtgaatcgatcatctgccgcaaaaataattccggagtacgataagccggaactaccacgctgataagaggtgcgtaagcaaattttttctttctttgtttgtcaaggaccgtctggtccggcacatatgccgcgtaccagggaccataagggatctcctccggctcaaagcgctcgtgcagccgtatccagaactcccttggaccataatgcttcagatacaaaagtcccttctggatcatgtaaggagataattttttgaagaaacgagaccactggatccgtccctctgatccgtttttatcgctcatattaaaatcctttgcttttataatgaccctattttaacattgaagaaacaattttgcaaggaagctgtaaaagaaaggttgaattgaaccacattttaggatatgattatatttgtattatatttttctattttacaggaaaaatatactatatgttatacttgcagcagaattgtatctgcactgtcagaaagagtgttaccatgttgttcacagacagcactgcagatacccttattttaatacaggagttcattatactatgaaaaagcgaaagataacctcagtttttctggctcttggtctttttgcatctcttcttttccaggttcccatatctgcagaagaggcagaccagagtgcagcaattgaagcatcaggtaccatatctaccaattccatttccggatggccacaggcttccgatatttcttctgaagcggctgtagtcatggagaataccaccaataccattctctattccaagaatgcagacgaagtacttttccctggaagtacagtcaagatcatgacctgtcttctggctcttgagaatacacagctcacaaatgaggttaccatgaccgccaccggagtttccggtgtcacagacggtggtgccagtatttcctcacaggttgacgaggtcttcactgtagagcagtgcctgtatgccattatggttgcctctgccaatgatattgcactgcagattgcagagcatgtaggcggttctgtagacggctttgtccagcagatgaatacccgggcacaggcgcttggatgtaccaataccgtattcacgaatcccaccggacttccggatgacaaccagcacactacagcccacgacatggcgctgatcatgcaggccgccatccagaatgagtctttcagaaccatcgcagcagccaccagctacacgatccctgccaccaataaagcggcagcccgtaacctgaccagcaaattcaccatgacagatactggcagcaccggattttatgaaggatgtatcggcggtaaggaaggttatacggaagcctccggaagtacactggtatgtgcagcccagcgaaatggcatgactctgatcagcgtagtcctgaaaggtgcttccggtcagacagctcctgatgcagcctctattctcaattatggattcgatcagtttgtaactttatcccttggagacagcgatttcagcattatctccggcggtgatgtagtagttccagccggcaccggtgccgatagccttaccacagaagattcccagaacggcgaccagattgaccgcacctacctttttaacggcacttctgtgggatctgcaatccttgaagttgttcagtctgatgatactgcctccgtccaggaaggtcagcagcacatgcaggcggccaaggactactccgataatcacactgaaattccgtattttgtaattgccggtgtattcttacttcttctgattcttttgatctggaggatcgtgaaaattgtaaaatcctaataaaaaacccagtcgggacagggtatcttcctctcccgactgggtttttatgttagttctgcatcaaactatttcatccttcttctcatacgccatcctgaatgcacaatctcctctcacaatactcagattcggattgtaatacggatcaccctttttcagaaaatctccgtaacgttcccggaaatgatccacctctttctgaagacgcgccttcttctccggcgtattctccagtccgcgtgacttagattcataatggtacaggcaggcctccggagtaaatacaaccaatttaccaagtgcccttgccctaagacagaagtcaatatcattcagtcccactgcaaagctttcatccagcccatgaagttcctcaaaaacgcttcgcttcaccatcagacaggcgcctgttactgcactctcatcctgtgtagttgccagtctccacaaatatcctgtggcatatctgtcatatccggtaagaatatgtcctgcaaaacctgcgattcctaccacaacaccagcatgctgaaccgtattatccgggtaaaggagcttggcacctacaatgcccacatcctctctctggcaatagcccatcatgttctctagccactctggagtaataacctctgtatcattattaagcagaaggaaataatctccatccgcatattttgcaccaaaattgttgattgctgaatagttgaagggaccatcccatgtaaccacttttgcctgaggataccgcttctcaagttcctcataatagtggaaggtctcttccttctcactgttattctcaattactataatctggatatttttccaggtgctcctctccagaatggaagtcacacatttattcagatcctctgtatgatccttattcggaatcagaatggataccttcgggtcaccctctataacaaaacgggttctgaaaacgaccgggcatccagtgtattccacctctgccttaattcccatgcgctcataatgccctgcaagagccttttctcctgcgatcactgcatatggcttgtcatccggattgcccgctgtggaaccctcatggcttctccagtgatacagaattttgggaatatggcggatcttctcactgtctgtatgctccgtgcagcgaagcagaaaatcaaagtcctgggaaccgtcatattctggccgcaaaagtcctgttcggtcgagaagtgttctctttacaaccaccagatggcagatataatttacgcagcacagataatcagggttaaaatccggcttaaaatgagggaaaagccgatttcctcttatatcaataatatcctcatcagaataaataagatccgcctccggatgctgtgagatctcctttgccatctgataaaaagcttcctctgccagggtatcatcatgatctgcaaatgcaatataatttccagtggcaattccaatagcagcatttgtattgtctgaaatctgcagctgtttgtcattgaaaacaactttgatccttggatcctttttctgatactcttccagaatactgcggattggagaatctgctccgcttccatctgaaagacaaagttcccagttgctgtatgtctgcgccagcacagaatccacaagagccttcaaaagatacttatccgtcttatagagaggaaccacaaggctaaacttaatattctcctgaaaaacagtctttctctgctgattcagttctttcttagtaaccctgttctccttcagccaggtctggtaaagaccgtctcccttgctcaatgcttccagcttgatcagagacttccggatcacagtatgaataccattggaacgataattctccattgcctttttcgaataaaggctggcttttgccttaaagcgttcgccctttgaaataccaatctggtagactgccttttttccgttctcatcctttgcaacaagataagccttctttccagatacattttctgcctggatatggaatccgcaatccttattcacttcgcattcccgaaacatttcagccacgtccattcgggtattccgcttcagggttattttcacaggctttttattttcatcatatacctgcagggaaaccggtgtagttcctactgcccagccggcaaggataaccttcttctgttctctgactatagattccccatctacaaaaagctgaggttttccctgttttctcataagatccggggttttcatcttataccagaggaaacgctcctttccgttaacagcgtacacctcaagttttttgtaattctgcagattttcaggcagggtaactaatacctccacccatttgcctcctggatttttcgtctccacagctctcataaatccggtcatcacagtaatcaggtttgtctcagaaggaaagcggataccatccagataacactcgatatctgcttcctttgaaacccttcctgtgatcatatatttgtaattatcattcaaaagaaaccgttctttttcaaccagcattaccttttgattcattctacattcctttctttgcagaagattcccgaccatttttcagacggcccactgcttctctcgcccgctctccaagcactcctttaagactgtgacttctcacctcaagggcacagatctcattcagcatatcttcttttgcctcatcaatctccagattcagtataagattcttagcaccttccggaacctctatatctacaatgcagggatcaaaccgtgagaggaaggcccagctgccgcagattgttccatctggtgtcagaaccccatccagggaagcaggcatcctgtcaaagcggattgcggcaagatgtaccgtacacggatgatcacctggatcaattctaataaacctgcagcttttcggcagattcaaggtgcattttacctttccggccataataggtctttttacagaacttgcttcggaatacatacctctttgttctgcgaaatatacctgcagcggtcccagactactcagggacaaatattccacccctggagtcattgtggcatacatctccctcataggaacatgcatgcctgtaatatatacctgaaaaccgctttccattctggaaaaactggttctcatcacttctgaaataccaaatttctcataaaatccggctgcattcagcacttcacgcactttatgcgtctgtatatagtaatggatgatccgatacagtacaaattcacagggaacaggaaactcaaatgtccattcatagtccagaagtgtatatggacgggtcattacaacattgtcacagatcatatcaatattcgtaacatctgtacatgtcagtccgccaggcataggcacatcaccgaaaacatttttgaattcctcagttattgtgaacggctttttgctgtgaagcttctgtacgttttccagatattccgtaaaaattttctcagctttttccttttctccctttcccagcagatcatccagatattctgcaagattctcctgttccagatactcaaaataagcacagtcttcgcctatctcgcacttgttgctcagaaacggaacttccccatacatctgatcaagcttctgattccattttttcatgcgaagaacatgttcttttccttccggatacagccattttttctccagccatcttttcccatcttcttccacaatgtcagtgcgaattgcgaaggaacggcttctttcattggaatatttactgaaaataatctctttcatttgttttccttcctttccacaatcaccaggaatgaattggaaaattcctgaaaaagtcctgcatcagtgagggaatcgtatacttttccctcattgaacaattgtattctgttacggtcaaaattgcagaaattatcccgaagctcgcctttcttcggcagacgcttgtctgaataaatagtcatcgggaatttataatccggatatggataatagaaagtggtcttaaattcaccagcctggtcaataatatcagacagttcctttctggaaaaagtccgcacacttctggtatccggatagttctccagtccttcaaaatattttcccacatgatcttcggtgcagccggcccagtatttcaggccaagtcggttctcaatcgcgatcacgattctgcctcccagtgccagatggcgggcaatgcgtcggagcatttccacataaggctgtgctgtcccgatatagccctgggaatattcaaacacaccgatcagggtaatgtaatcatatttctcagtaaggctactctccacatcctgaaaatttcctaccataattttcacattatcacattcgcgatttcgatatgcattgatggtgctgcgcatttttgacagatcgatacaggtgacacttttggcttttcgcgcgagaactcctgtgatcggtccacatccggacccgatttccagaaccttctgttcttttgtgataggaagccactccagaatattctggcgaatatgtgaaaaatgataaaggaccggccagctgtttcgctcatagatcaactggtttagttccttctcctgataatttttcgcaatttccagaagttcttcttccacaggaccatcactgtacagatcctcgcctgggtaatattcataatctaatgttacgtttccgattttttcctgcatattttattattcctctatccacactttggaattcatatcgtagaatccaactgtatttttggaagaaaccacagttatgttgcatgcatcatataaacgatggaatacggtaaaatctccattccgatagccggtacagccaaaggagagaagatattccccaccctgcatatccattttctgctcaaaaaccactacacactcatcccctgcgtctgtgtgttccacattcacaccttcatacatagtgttggttcctgtgatctcagttccctgaatattcttgaatgtgaaagccataataggctgctgaatgctttcatgaaaatgaatgcgcattttaatctgaaatttagaccccttctcgatcgtgttggtctgaaggctcttggaatccattacaacgaagtctgtgatctcagcctgtttttccccatactccaatgtgttcgggttcacaaggaatccctgtttccagtcttctttctttgtctctgagccttctgcctgtttcaccggatcctgatgtaccagaagctgcttatacatgtctaccatagctttaggcgtaccctcgtccagcatgacaccctgattcaaaagaataacacgatcgcagtatttggaaatgcttcccaggtcgtgacttacaaacaaaatagttttgccctgtttcttaaattcctcaaacttatgatagcatttcgcctgaaaaaatacatcacctacagaaagtgcttcatccactaccaggatctccggatctatgttgatagccacagcaaaggccaggcgtacaaacataccactggagtaggtctttaccggctgatggataaagtcaccaatatctgcaaaactgaggatttcatccagccttgcgttgatttcttcttcggaaaagcctaacatggtaccattcaggaaaatattttccataccagaatattccggattaaatccggctcccagttccagaagagccgaaattcttccatttacggttacggttccggttgtaggagccagtacaccggtaataattttcagaatagtggattttccggagccgtttgttccaataataccaacgcattctccttctccaatatcaaaactaacatccttaagtgcataatgctctttatacagcttcttacgactaagccccagagaatccttcaggcgatccagtggtctgttatagagcttatacatcttggacaaatttcttatttcaatggcgtttttactttccacgttgtttcctttcttttctatccgcatcataactgctcagttcttctacagttctgtacttcatcgaacatgtctcatgagccgttacctttcctcttcgctgaatacatttcgattcataactgcttttcttctttttacagaacatctgcaaaatgaacccgaagccgcttaaaaatccagtttccaaacaggaagcagcagatggcaaatacccagaaatataatgtccagactggtctttcgaagaaccagcgcttgataataaatgcgtcacgatatcctgatacaatataaaatacaggattcagctgaagaattttgtatagaaggctgttggtaccgatcatgctctctgacacccacataataggagtcaaccatactccaacctgtaatccgataccaataatctggttcagatcgcggaaaaggactgcaattgcgctggtagcatagcaaagtcccaacacaagaaaaaagacgcatgcactataatacaatatctgaaggtagtaccagtcaggaaatcttccgttacatatataaagaataattgccagaagtacaaaaaagccatgtacaaataaagcggaaattatttttaccactggaaggacgctaatgttgaacactaccttttttacaaggtaattgtattccagaagcgaattggtacctccggaaagcgcatcagaaaagaaaaaccagggcacaataccagctaccagataaagcacaaaagggactcccagttcatctgtgttggaccggaaccccactgaaaatacaaaccagtataccagaattgttaccactggctgaacgaaagcccagaaggttccaaaataagaacctgcatatcgggtcttgaaatcattttttgccagtttcataaccagccggcggtttttatataaatccgccggcagggaaaaaatagacttaagcatttacagtctcctatctgttaagttccttaaagctgccccatttctgatccttgtcagagaagatcagctccataccttccggaatcggccactgtacattgatgtccggatcattccagatcagaccgccctcatcgtttggatgataaaaatcggagcatttataagtaaactccgcattctcagaaagaaccaggaagccatgtgcaaatcctttcggaataaaaaactgtttcttattctctgctgaaagaacaactccgtaccattttccataagttttggagccctctcttaaatctacagccacatcaaacacttctccgtttactacgcggacaagtttgtcctgtggataatgaagctggaaatggagaccgcgaagaacaccataacgtgagctggactgattatcctgtacgaattctacgtcaattcctgcctctttgaagtcattgtaattgtaagtctccataaaataacctctggaatctccaaatacggttggctcgattacttttaatccttcaatatcatcacaatttgttactttaatttttcccattttcttttctccttatttatctttcattttatattcagtcaaatttacagtcttatcgacttcttggaacgtgtttaaaaaggttttctgcaagatgtgcgtcacaatttgtgggagatctttcaaacacgctctaatatacatgattccggctgataaatcaagattattggttactgttactggtcatccgatctgtattgtttggtacatacaccatttttgttaaatacggaaacgagtccatctgcactagtcaggctcacgttctgcgcacgtactcctgcgccagcacccgttccgcggtagaaataatatttttttcctttgatagtgtaccagcccttataagcctttccattttttccaaaataataagtattcttcctgccattctctgtgagggtgataaacttgttctttgcacggtaacctttacttccaaaatagtaaatgctgccgttggctgctacatatttgtaattcttttccatggaaaaggatgtagtgctgaaataataatatttcctgcccaccttgcgcatacctgtcagggctttgccatctgctccgaaatagtaggtcttgcctttctttgtcacaactttattttctacacgtacgccgtttttgtccacgtaataagcagtgccgtctttcttgatcagcttgcttttatataagtgtccgtctacggaactaaagcagtaatacttgccatcaatttccagccatcctttggcctttttatcatttgtgtagtaatattttctgcctttaacagtggtccagccattcttgtgaagcttgggatctgaatataaaggctgttttgcaggggtatagccttcctgagaattccatctgggaacaaccttggttgtataatctacatagccaaagttcagatccacattgttctctttgggaactccactgatcagcttcttggtactgatcatacctgaaacttcatcaccagctgtgcactgccagatggtgtatttgtatttgctggcgctcggtgcaagaattgtatctccgtagcttgcaatccagacatccagaccggagccttccagaacgttccagtctacaaaattattataccaattcagattcatgtagagaattggtgtatatcctgccttgcggatctcatcacagaatgtgagagcaatctgggaaatttcctttctggtcaaggttcccaatgtagcttcatcttccaggtcaaaagctaccggataggaaaccttatgtccctgcatctgacgaatagccagctgcgcttcagcaagtgcttctttgtttgtcttggcaagactgtatacataagttcccaccggcacatctgctgcttctgcctcagtcatattatagtcataataatcatccagatgtctggttccataggaaatacgcacaaaggcaaaatccagatctttcttggcttccttccaattgatctttccctgccattctgagacatccatacctctggtaatggctccttctactttctttccgcttccattgtaacagactccgtcaattttgtgccatgcctttgagcttgtcttggaagaggaatctcctacacttggcgccagctgcgcatctggtgaaacattttcaatattatatggcttatttcctgcattggcacttacatctgcagttggtcctgcaattattgcagttccaagcatagctgtaaataaaccggcagacagccattttttccattttcccatatctcctcctgataaacagtttcaggttacgatccttaccggaccagtagtgtttaccgttttcccttattcgcttgtttcttacaagatgttaaaaatgtgttactttgttattatacagtttccattttcaaatttcaatgttattctccaaaacagtaaaaaggtgccttaaaatcatcaaatctgataattttaagacaccctttttggctttttatgtcgtttttttatcaacaactatctttcagagtaagctattaagctgccggatcggtcggatcgtagtatccgccattcttaattcccctcagcggtgtaattgcgcgacgtcccagcggtcctttgaatacctcatcagatttataggttccatcgaaaatataaatagtggaaccattgcagttctcatatacccattttgcatcggcaacacaggtacggatacagccatgggaagcagggcttccaagcttaagatatgcactaaccggcaaattatagctgtttgctgagccgcatgcaatagaatggacgaaaattccgccctgaccagcaccatctacatgagtaccatactgtccccaggacggtcccataagcgcctgccatctgctgtatcttgtcagtttatatctacctgtcggagtatcggttccaggattgcctactgaaacacgaatggtcttaaccggaattgtacggttcgcatctgcataaattgtcataacaccatttacacgatccacttcaactgtatatccggatttgtaaatatttgtcacgtcattgattctgtaaccattcttatcaaagtaatacagcttgccatcaatccacttggattcattttgtacaaagcccttcttatccgggttaatgtaacgaaccagattctgggaattgtctacaaccacccagcctgtagtgaacttaccagtggcatctacatatccgtattttttgcctttcttcacgaatgcattcttcacaagactcatattcttgaagtaataccagtttccatcaatcttctgccatccgctcttgcgaagtacacccttagagtctgcaaaatatgtttttttcttgtaaacaaacatttcattcttaaccatctggccatttcttgtattagatgtagatggtttaaagaaataactcttgccattgattacggtaactccgctggcaagtcttccgtcagctttgaaataatatccgtttctcagtgtattggcgtaatgatttccttttttattgaacaggaaccagccatagaatttccccttagaggtggttactttctgccatccggttttcttcacaatccggccagcagtagaaccaaaatagtacattctgtttccagccccaggacagcggtgccatacctttttccaggttgctcttgcaccggtttctgttacataatattgtttctttttataagtgacaatacgattcttataaatgcaaccattcttatctgtcagataatatttgccatctgtggctttcttcatagtcttcttaagaagatagccattcttatcgatcagataggaattttccgcatctttatgtccgtcaagatctgttacaataacgccatgaaccataagctgtccaatcttactgctgtccagctcaccggaatcataatatttccactgctcaccggctgttcctacaaaactcttccatccatcacggtacatctttcctggaatttcctgatctgtttctgctggctggaagtagtactgtgcagctactccgtttactgtcagagtaacatcccctatacgtggtgttccattctcatccagacaataatactcatcattgatcttataatatcctgtatatgtattatttgccttggcggcttcatccagctgtgcagtggttaatgtcttaccatctgcgccataataatggaagtttctgctttctttgttccacagccagtaatccttcttcatctgaccaagtgtggtcttccacggaaccagtgcagcaccctgtccattatattctgtatatgcctgtgcactatcggaagctgtaaaatagaattcaccaacagccccatttgcactctccgttccagctaaagtcttaatgccagtaaccagaaatccattggcatcaaacagataacttcctgtatgaactgctccagcctcgtttcttgtagtaatctctacaattccatctgccgcagtataatattcagcctgagcagttgttccttcagcctctacactttccgtacctgctgcttcgccattctcctggacttcatcaaaagcctgaatctcatcagaaccagccacattctgagcctcagcagctgcacttacagctgatttcttcttgcgaagcttaaaaccatcagctgtctgctcccattctttccagtcaaatactccgtctgaattatctgcctgtacttcctgagtcccatccaatgtgccttcaggaacagcttcaaatccatctaccggagcagtacttccattctcctccactgtttcacctgaagtaaagccatcgaaaaaaccatctgtactttctcctgaattttcgctgtctgtatgttcttccttgtcctggctttcctgtacctgctgctcctcagctgctgccgtatctgcaggcacctctgtatcctcagacggctgtactgcttcggctccatcttctgtttgcacatctgctgcctgttcagatgtaaatccggattcaaatccgctatccaaagctgcggctggaacttccagacccatggacacacttaacataatccctaaaactgcggctgctactctctttttcacttttatgcctccctattgtaacgttgtaaatcttattctcctaaaccattgttgataacagttacaagatttcttaaagcctctgtttcgtcctcgccttcgcaaaatatagtaatctcatcaccacatttcacacacgcgcccagaacactgagcacgcttttggcattggcagacccctgaccatactgaaatgttataagagatttatatttcatagcttccttacaaagaatgcctgccggtcgtaaatgaaggccggaaggattgttcacccttactttctcacttaccatagtttctctcccttattgctgctgttctctagatccatggcaatatatttcgccaaacgttatccgtaaacaacagctcattcattattagtatctgaattggaaacttctgatatagtcacatctgcaaccacatcatccagaagttcaaatcccttag

SEQ ID NO: 1164 - DNA, 43498 bp, unidentified
  source 1..43498: mol_type = unassigned DNA
ccatcatattcgcagaaaagacccccgtttataaggttgccagatgtgttgccaacagcactctcgttgttcatggttgtctggtggtgacgataatacataaaaccaccaaaacctatacctgtagctgcaagtattatgatgacagctgttataatttttttcataagcgcctccaatatttaaagaaataactaattacatattacaaaaaatatgatacaatatcaatggttttatcagtttaaagtgataaatgtaaaaattatagatactgtttagtgaggttaagatatgttggatttaggacagataagaaacgaaatagacggaatagataaacagcttgtagaactttttgagcagagaatgaaacttacaaaggaagttgcagaatataagatacagacaggtaaaaaggtgcttgacagggaaagggaaaaagcaaaaatagagtcggtcacaaagcttgttaaaaataaggaaaatgttcatgctattgatgatcttttttcacagataatggcgaattcaagaaagggacaataccagctgttagaggcaatggggcagacattaagacagccatatgaggccatagatgagataaaaaaagatggagtaaagattgtgtatcaggggataccaggtgcatacacacaggaagctgcctgcaacttttttggagaagactgtgataattatgatgtgcctacatggcgtgatgttatggaggcagttaagaataaagaagcagattatggtgtgcttccaatagaaaactctacgacaggaagcgttgtcggagtgtacgatcttttacaggagtatgataactacataatagcggaaacatttgtaaatatagatcatgttcttgtaggactttctggcactgatatagataaggttacaacagtatattcacatccacaggggattatgcagtgtgacaagtttcttaatacacataaggactggcagagaatcaatcaggctaatacggctatggcggcaagaatgcttcttagtgaaaatgataaaacacatgttgcgatatcaagcaaaaaggctgcacagatatatggacttgaggttttaaagacaggtattgcagatttatctaataatacgactaagtttgtcataataactaactcacgtaagttcttaaagaatgcaaacaaaacaagcattgtatttgagacagctaatgaagcaggaacattgtataatctgttaagccatataatatataatggacttaatatgtataaaatagaatcaagaccaagtgaatcaaagcagtgggattataagttcttcgttgactttgaaggaaatatagatgatccgagggttatgaatgcattaagaggcatagaagaagaggcaaagtctattaaactacttggaaactattaaataatggcaatattattgatagctaacattgtttatgaaaaatataattgaaatatatcttaatatagtgtaacctattgatataagctgtacaactggcggaaagcatatataggatatcagatagaggattcagcatggtgttgaagtatgtatcattgcattgaagtaagtatatgtggtgggattacccacagggagtacagtaataatatgtttatcagccgaccgcctgggcaaccctgtaaaggttactcaggatgggcggctttttatatatctgttgttttattagtttacattaacagttatataagaagcagacaatccaggtaacagtgtagttagtgtcttaacgcataaggcatggctatatagtgatttataaaatgcgtagaaatgaggattaatatgcagattacaacattggaaaaagaattatcaggatgcgcttatccaggaagaggaattgttattggcagatcggaagatggaagtaaggcagtaacagcgtatttcattatgggaagaagtgccaacagccgtaacagagtatttgtagaagatggtgaaggcataagaacagaggcttttgatccaagtaagcttgaggatccaagtcttataatatatgcaccagtaagaatacttggtaagaagacaatagttactaatggtgaccagacagatacagtttatgatcttatgagttctggaaagacatttgaagaatcattaagaacaagagagtttgaacctgatgcacctaacttcactcctagaatatcgggtcttatgacagttgatgacggtaaatatgactatgcaatgtctatattaaagagccacaacggtaatcctgaccagtgtgacagatatacatttacttatgatgcaccagttgccggagaaggacattttatccacacatatatgaacgatggaaatcctcttccaagctttgaaggtgagccggcatgggtaaagattgatggtgatattgatacattcactaatatgatatggaacaatcttaatgaagataataaggtatcactttttgtcagatttattgatattaagacaggtaagtacgaaacaagaattatcaataagaataagtaatataaaatatttgtgtatgtgtatttttgcataaatgatatgggttcaaaatgtatggaaaatacacagaatagagaaatagtgtgtaaagaagcagcgcaagaatggagattattatgaacgaatttcagttaaaatatggatgtaatcctaatcagaaaccttcaagaatatttatggcagatggaagtgagcttccagtagaaatattaaatggccgtccgggatatatcaatttccttgatgcctttaatggatatcagcttgtaaaggagttaaaggaggcaacaggacttccagcagcgacatcttttaagcatgtatcaccagcaggtgcagcagtaggacttccactctcagatgttgagaagaagatatactgggttgatgaaagcataggtgaactttctgcattagcatgtgcgtatgcaagagcaagaggtgctgacagaatgtcttcatttggtgattttatatcactttctgatgtgtgtgatgttgcaacagcaaaacttattcagcatgaagtatcagatggtattatagcaccaggttacgagcctgaagctttagagattcttaagactaagaagaagggtaactataatgttattaagattgatccagcatataagccagcacctatcgaaagaaagcaggtatatggtgtgaccttcgagcagggacgcaatgagtttaagattgatgaagaacttcttaataatgttgttacagacaataaggatattccacagcaggctaagattgatcttataattgcacttataacacttaagtatactcagtctaattcagtgtgctatacaaagaatggccaggctattggtattggagcaggacagcagtcaagaatccattgtacaagacttgcaggacagaaggctgataactggtttttaagacagaatcctaaggtgcttgcacttccttttaaagaaggtgttggcagagctgacagagataatgctattgacctttatataggcgatgagtatatggatattcttgaagatggagcatgggagagagtatttactgaaaagccagaagtattcacagcagaagaaaagaaggcatggcttgcaacaaacacagatgttgcacttggttcagatgcgttcttcccatttggtgataacattgaaagagcatataagagcggtgttaagtacatagcacagccaggcggttcgatcagggatgataatgttattgaaacatgtaataagagaaatatagcaatgtgcttcacaggaatgagattattccatcattaataagcctgtatatagaactatatagaaaaagtaccctgttatctggtagtgatacctgatagcagggattttgttttatatagttgttttatatagttagtctagaataaatgtgaaatcttttatagagaaggctcctgtgccctcgaacataaagtaaagaggctttattccagaaggattgcttaaatgtagctcaatggttttccagttatctgaattattattgtgtaatgtgtcagatatgtctatatatgtgctggcgttcttattatagtctttaaattctttatctgcataatccatgtcggttgttatgcttatgtatcctttagcggtacctttaatattgattttaattagtatttttttggattgttgtttatcgaaatcaaagtatttatatccgattatgcagccattctgtatatttttaatatattgatcatcaccagcttccctgtcatctccatcctgtgtcacataaggcataagtaagagattgtcttctttagttatatcaggtgttaaggagaggtttcttacatgacaggttatatatgccggatatgtaccacaagcatcaagagctgtattgtttaatccacagcttgttgcttctgcctgatgtatatgtccgtttttttcaatatttattttctcagccacaccctgtctgcaataagagctattgttagtaaaacggtggtcaaatacataatactgtccatttatgtctattatactgccatgagtattgccgttaggatatgctgtattctctatagtgtaaccgcgtagtccaatatcagaggcggaatgaatacgtcctccgtatacaaaatcacgatctggataagtgcttgttgcataatgcagtccattaacgcgtgcagaatatataaagtaataggtgctgcctattttacgcatagaggaggcttcgaaaaaaccagcattttctggacatttaaaatctcttggaataatgatatgtggaagttcatacatagtaatcatatctggcataagacggcatacaaaagcaccctgcatgatgcgtccatgttcatcttctgtttttttaggacagaaaccggagtataaatatacgctgttatcatcatcaataaaaacacctgggtcaaactggacataatcacctggtgatatgccatatactcgtccatcttttgtttttacatcgccaagatattcaaatctgccagcaggactatcacataccgctacagacattcgtgatgagtgggcaacagaatagtaaagataatatcttttatcaataccttgcacaacatctggtgcaaaaagcaacattctttcctctttgtgaggatgttgcctacggttataaatttctccttcgaacctccagtctgataaattatcaacaggcgcagaccagcacacatagtcattttcacagtaggttgtgccgttgaagcggtcgtggcttccgtatatgtataaacggttattaaatatgtgaggttctccatcgggaatgtattcgtaacttggaaggtaagggttaaaaataggtttcataaaacacacacctcctcaatttatatttataattatactttataaatataaattaagaaagtgcttaagagtgttttttatgcttaatatatataattaaaagaaatgcttaatggtaattatttgaatttaaatgtattctcaagagtatcccacttagtatctttttcgctaaagttaagtggtgttccatcttcaagcttatatccggatggatctgcgtttccaggatattcaccaacaagctgtggccattcaataccaatgcttggatcattccaggcaagaccgccttcatcaccaggatggtagaagtcagtaactttataacaaaattctgcttcgtcacttaatacgaggaatccgtgtgcaaagccttcacttatatagaactgctttttgttttcttctgtgagttctacaccaaaccattttccataagttttagaaccggcacgtaaatcaacggcaacatcaaatacgcttccttttataacacgcacaagcttgccttgtggaaattccttttgaaaatgtaatccgcgaagtacacccttagtagagcttgactggttatcctgaacgaataccatatcaagacctgcttcgtgcatatcgttctgattgtatgtttccataaaatatccacggttgtcaccatgaacagttggttctattatataaagaccttcaatatcacaaggtgttactttaatctgtcccataattattacctctttgtaattcattattatataatccgtctgacatgtggataaatactgtcagacggaatttaacaggcattcttattgcagaattgaatgtcaattctagcggttagaatacattttttcgtagtaattctgatattcgccagatatgatagtctcccaccattctttattatcaagataccactgtatagtcttctttataccatcttcaaacttagtttctggtaaccagccgagttcgttatgaatcttagtaggatcaatagcataacgcatatcatgtcctttacgatcgcctacatgaacgataagtgattcaggttttccaagttctttgcagataagtttaacaatgtcgatatttctcttttcgttgtgtcctccgacattgtatacttcaccaacacgtcccttatgaatgataagatcaatagctttacaatgatcttcaacatagagccagtcacgtacattaagaccttctccatatacaggaagtggcttatcgttaagggcgttagctatcataagagggataagtttttctggaaaatgatatggaccatagttattagagcatctgcttatagttacaggaagtccataagttctgtgatatgccaatactaaaagatcagcacctgcctttgatgagctgtatgggcttgatgtatggattggagtttcttctgtgaagaaaaggtctggtctgtcaagaggaagatcaccatatacttcatcagtagaaacctggtgataacgtttgatgccgtattttctgcaggcatccataaggacagcagtacccttgatgttagtgtcaaggaaaatctcaggattctctatagaacggtcaacatgtgattcagcagcaaagttaacaaccatgtctgggtgttcttcttcaaaaagtttatatacagcttctctgtctgtaatgctttctttaacgaatctgaaattagggttatccattacaggggcaagtgttgaaagattgcctgcatatgtgagacagtcaagacagatgattctgtagtcaggatatttttttaacatatggaaaataaagttacttccgataaatccggcaccgccggtgacaataatattcataatttaatttacctttctgatagttatattaagatatcagggtggaaaatgttttgactctgatatcatatttgattcgtaatttagaataggaattagtatatgaaatttagctgtgtagcacatctatatactttccatcaagtacatcttttaaatactgaccatattggtttttctttaatacttcatataccttaagtacatcatccttagttatccagccattaagataagctatctcttcaaggcaggctatcttacgatgctggtgagtttcaatagttttaacaaagttagtcgcttcaacaaggctttcatgggtaccagtatcaagccatgtaaatccctgacctaaaagttctacgttaagattaccattttcaagatatattctgttaaggtctgtaatctcaagttcacctcttgctgatggcttaagattcttagcatattctacaaccttattatcatagaagtaaagacctgttacgcagtagttactcttaggcttttcaggcttttcttctatagatacagcctttccgtccttattgaattcaacgataccgaatctttcaggatcatcaacgtagtatccaaatactgttgcaccaacgccatcttcagcattcttaacagcactcttaagtctgtccttaagaccgttaccggcaaatatgttatcgccaagaatcattgcaacagtgtcattgcctatgaattcttcaccgataataaatgcctgtgcaagtccgtcaggtgatggctgtacagcataagaaagattgacaccaaactggcttccatccccaagaagttccttgaatctaggtgtatcctgaggagtagaaatgataagaatatctcttattccagcagtcataagaactgacataggataataaatcataggcttatcatagattggaagaagctgtttacttgtaaccattgtaagtggataaagacgtgtgcctgaaccaccagctaaaataatacctttcatatgtattctccttaaaattaatattttgtctaataagttaatttgttttcatttatttcaaatacataataaatggtgacgttacgtaatcttcaagtgctttttaaaaaaattatgaaagttgcagtaaaaaggcaataatggtagaatacatttagttacagacaattcattcggaagggagtattggagtatgggggaaatattgaaacttccaataggtgtagaaaactatgcataaggaaggattttattcatcaggagagttcgcaaagaaggcaaatgttactgtaagaaccataaggtattatgataaacagaatatattaaagccatcttatgtaactgatacaggtgtaaggttttatacagattctgattttacaagattacagcagatattattgcttaagtatcttggcttttcacttgatgatataaaaaatatgactatcggtgattcggattataacatacttaagaattcacttcatttacagcttaagcttatacaggataagattgcacagatggagctggtaaagaatgctatagaggatacagttgaaacaatagataggaataattcaatagactggagcagtatgctgtcactaattcatcttactaatatggaaagtagtttgaagacacagtatcagaatgcgggaaatatatcagcaagaattaatctgcatgcgatgtattctgttaataagcagggatggtttaggtggatatatgaagaggggaatatatcagaacataaaaaaatactggagcttggctgcggtgatggaagactatgggttgataatatatctaatgttgttgaggctgtacatattaaaaaaattactgtaacagatatatcagaaggtatggttaatgatgcaaggcgtaatatagagtgtgcaatcagggaagcttctttcactttaaattcaaatataagtcggaaattcgaatatggaatggctgactgccagagtattccatatgaggataatacatatgattgtataattgccaatcatgttatgttttactgtgataatatagataaagcattcggtgagattcaaagggttctaaaaccaggtggaatatttatatgtgctacatatggttcacaccatatgcaggaaataagtaagcttgttaaggaattcgataaaagaatagtgctggcagctgataatctgtatgataagtttggtcttgaaggtggagaagagcttcttgatggatactttgaacggattagtatgaagagatatgatgattatcttttagtggataaggcagatccattggtagaatatattctctcgtgtcatggaaaccagaatcagtatctgcttgacagatattccgattttaagacatttatacagaaaaaattaagaagaccatttgttataacaaaagatgctgggatgtttttgtgcatgaaagatttaaatatggtataaaattttttatgtgacaatatttgttgtgaaggtgcttttagattttaatatattgaatttgtatatgaagtatggtaaaattgttcagataatgtgacaatattctgggttattatgaactatgttattaagatgatagtatacatagtcatctgtgatcagaaactattgctatatttcggacttattaattaaaaagttggtaataataaatatatatttataaaaaataaacagaggtcagatatggatatatccaagattcttttaaatgctggtgaagcattaagaccagcacttacaaagattattcctatgaaaatgttaagcaggattaaggcaggggtaattaataatgcagcagataagctttctgctgatgcgataattaaatatgaacatggatattacaaagagggagctaatgttattggtaatgtcaagggagataatggcctgggacaaagtataagaataatgtgcaggctgcttgatgagaataatgaagaacatgttataaaggatttttttgttccaccaggaggctcaagaacaaatgatacatatgatgacaggcttacagacaagcttccgtatgatgttaatataatacacgtcaatgccagtgagatgatggtggcatacgtcagtatgggaaaacaggtatgggattacagatataatataggatattgggcctgggagcttgaaacatttccagaagaatggatacctgcatttaaacttgtagatgagatatggacaccttctgattttgtgactaatacgcttaagaaatatactgataagccggttattactgtaccacactgtgtggcacctaaggcagaaccaacttatgatagaaagcattttggacttccagaggataaattcctctttcttgttatgtataatagcggaagtgttatggaacgaaagaatccattggcagctattaaagcatttaaagaggctttctgtaaagatgaagaaacaaagaaaaaatatcagaatgcaggacttgtaataaaagttgctgagtcagagctatctgctgatgatgagtctattattaattcggttattgataaagatgataacatatattatatgtgtggacatgttaataaaaaagaggttaattcactcttagcagatgtagatgtttatgtttcgttacatagatcagaaggtttcggacttgttatggctgaggctatgtatcttggaacacctgtcatagctactaactggtctggaaatacagagtttatgaataatgataccgcatgtatggtaggatatgatctgatagaacttgataaagattatgatgtcttcaaaaaaggaaatgtatgggctgatgcacatgttgatgaggcggcagattatatgaagagattatatgaggataatgttttctataataagatagcatcaaatggacagtcatatgctaaggaacatctagcatataaacgctcagctgacatagtcagtgaaagactgaaagctatacattcaggagatatgtagaatagtgtatatataatctgtgttagtttgacaaagaaaaatgttgttattataatatgcaagatttgcatatttcaaaagatattaacagcaattaacatattagacgtatagaggagattttcttatgcagcacataaaagaattatatgaatacagggaaatgattataagccttgtaaggaaagatcttagaggaagatataaaggctctgtacttggatttttatggacatttattaatccattgttacagcttattgtgtatacaatagtattctctattattatgaatgctaactatgagcagtattatctgttcctttttgttgcgttagtaccatggatgttcttttcatctagtgttactgatggggccgccagtattttaaaagagaaagatatggtcaaaaagatatactttccaagagaggtgctgcctatatctacagtaacaagtgcatttgttaatatgattcttacttttttagttgtttttgcagttgttatagttgcaggcaggtcaattaatccattggccttattatgtcttccagttgttatgatggtggaatatatattatgtcttggtatagcattaatagtatcatctattacagtttatttaagagaccttcagtatattcttggaatatttgttatggcactccagtatatgacaccagttatgtatggtgttgatatggttgaaagatcaggggctggtaagtggcttattcttatatttaaccttaatcctatgacacctattattaagatatacagacagattatttattatggtgaagttccagaactttcatcattattgatagctgttgttgttggagttgtatttatagttgtaggagaaatattatttaagaaacttcagaaaggattcgcagaggagttctagtataaaaaataagccggataacttattttatacatgcgatatttgcgtctgagtatgcttgagacagactcgatatgtgcaaaatcgtgcgcagaaatggagattggtatggataaagagaatgcaattgaagttaagaatataactaaagattttaaagtctattatgataagggaagcgaacttaaagaaaagatgcttttctggaaacgtaacagatatgagaaaagacatgtattaaaaggaataagttttactgtaaaaaaaggtgaggctataggtcttgttggtaaaaatggatgtggtaagagtaccacattaaaaatgcttacaaaaatcatatatcctgatacaggttctattgaaatgtgtggaagagtatcaagtcttcttgagcttggtgcaggatttcacccagatatgagtggaagggaaaatatatatactaatgcatctatattcggacttacaaagaaagagatagatgcaagacttgatgatataatagcgttctctgaacttgaggattatatagataatcctgtaagaacatattcatcaggtatgtatatgagacttgcgttcgctgtagctatcaatgttgatgcagatattcttcttattgatgagattcttgcagtaggtgatgctaactatcaggcaaagtgttttaataagttaagagaaataaaggcagatggaacaactatagtaatagtttcacattcacttggacagatagaacagatatgtgaccgttctatatggattaaagatggtcttatagaagcagaaggaactccaaaggatgttcatcttaagtatcttgattatatgaatcaggagcgtatggagcaggctgaaaaggaacagatgcgtcaggcaaagcttgaacgagaacagatggagaaaaagaaagaagaagaacgtatcaagaaggaaagagctaaagttaattcaagatatggtagtgaagacgctaagtttactgagattcatatgtataatgccaaaggagaggaatcacgtatattcagaactggcgaaaaaatgatattagatctcagttaccatgttgaaaataaagtctcagatgcggtatttggatttggtatattcagaaatgatgcattatggtgttatggaactaacacaagaattgatagaatatcgaattttgatattgaaaaggatggaaaatataaggttattcttgatgatgttaaccttataccaggtaattactgggtagatataactattgaatatggtgagggaatacctgtagattattacaagcaggctattaagtttgaagtggtttcaaacctcacagatgtaggtgttacgagaattcctcatagttgggaacttgatgtggaatatcatgaaactgcagaaaagaaagaagaacagaaataagtatattaaacaaaagataatgctagcaattaatgtaataataaatgttggttttattaaggaaaggaatgcgaaatgaaaaaggcaaaaccatggattaaggttcttggatttatagctggtcttgcagttatattaatggtatgtgattttgtttttgcacagactggttatgtacgattcataatccatgaagaaaaaaagggtggttacgatacgattgtagttggagcatctcattgcaggggagcgatagatccacaaagattagatgataaacttggaactaatacacttaatcttgcaattccaggtgaatcagtacaggattcatattttctcataaaagatgcagctaagaataatgacattaagaccattatatttgatcttgattatcagtactggtattatgagcagcctactacacattttactaagtcttttatatatcagcagtttactgatccgatggtaaagcttgagtacatggctaggaattttgatgttctggatatgcggaatgtattagttaacaggttaagctggaatatgtcagtaagtggcgttaaaagaaatgtcagcatgaagacatctgatgcatataagaattatacaatagagtctgcatatggtgagaatggctttgtagagggtgcagatggtccatatgttggaaagggcttttttgacagacagggaactgaacagggaaagcttccacctggtgaagattatatagctacatgggtggacagatatgatgatgagatagatacggctgtaaaggaaatctttatggacattgttgaattttgtaaagacaataatatagaacttatatgtgtcacatcacctataacaccttcagtaactaaaacgcttggaatgtcaacagtacatgatactatgtctgaattctttgttaacgaatgcggacttgaatattatgattttaacaaagcacttatgagtagtgttccaagagatgactgtgattatggtgatcaggaaggacatatgggaggacagcttgctgaaatttattcaaaggctttagctaatcttttatatgacagaaaaaatggtggcgttgacgagagtaagtatttttattcaacatttgaagatatgtataaaaatatgaaacaggattacactaaagagactggaaacgaatggaaaggactttaatatgtcatttgcggttgtaggttattttgcctttttattaataggattggtgttgtattatgttttacctaagaagataagatggatatggcttcttgccttaagttatatatattattttacattcagtataaagacgtctatatatatggtatttactacggtggttatatatatgggtggaatatggctcgataagattattacagatagtaatgcttatataacggctaataaagcatctatgtcaaaggaagagaaaaaagcatataaggataaaacaaaaaagagaaagagacaggcacttcttgtcgtattgctcctttgttttggacaacttgcggttattaagtatacagactttgctattgaaaacataaatagtatcataagtctgtttggtggtcagaatatgattaatctgccaaagtttgcacttcctttaggaatttcattttttacgttccagtctgcctcttatataatcgatgtttatcagggaaagtacagatgccagaacaatgtttttaagcttggattgtttgtttcattctttcctcagctcctgcagggacctataggaagatatgacagactttcatcacagctgtacgaaggaaattcatttgaattaaagaatgtgcagtatggccttcagagaatatgctggggtcttgctaagaaagttatactggcagacagggcagctgtattggttaatatggtgtttgaagattatgatatgtatggtggtcttcttaatattgtggctgttcttatgtattctgttcagttatatatggatttttcaggtggtattgatgtggtgattggtaccgcacagatgtttggcataactatggatgaaaatttcagacagccttatttttctaaatctataggtgaattttggagaagatggcatattacacttggtacatggatgaaggattatatattctatcctatgtcactttctaaagctatgaataagtttggtaagtggggaaagaagcattttggcaatgtaggacgtacacttcctatatgttttgctaatcttgtgatattctttgtagtaggtatatggcatggtgcttcgtggaaatatatagcatatggtatgtacaatggtgttattattgcttttagtaatcttgttgaacctttatataacaaagctttggataagttaaatatcagaaatgattctaaaccatggaaattatggatgatattaagaacatttatacttgtcaatattggctggtattttgacatgggaacatctttaagagctgctctcactatgattaaacagtcagtggtaagtttcagtttttctcagtttactgatggaagtctgttaactttaggacttgaagcaagggattatgtaattatactagttggctgtatagtagtgtttataataagtgttctgaaagaaaagggtataaatataagagagagtattgcttctaagaatatagtgatcagatggacattgtattatgtacttatactagttataataatgtttggatatacaggtggagtacaggcatttatatatgctaatttctaaagaggtctgtcaaggttaaagtttacctacagcatatattgaataagcgtattacagaccagaatagtaattaaatgtaagtctgtaataatcagaatggaggattttcatggacaacaataatcagattaatgttcaggatataatgaaagaaataaaaaaggacatagaagttaaaggttacactaatgaccttttaagctttgatgatgttatagtagatgttggagctatgaatgtaaataagtttgataaggttaaatttaatgaagatttatatgttgctaatcatgaatgggaggtaaatccatacagaccgcttcagggtaataaagcagcagttttctttaagaaggttattagaaagcttgtttatttttttgtagagcctatcgtaatggcacaggatggattcaatgcttctcttgtaagacttatgaatcagatgggatgttatatagatgaacagaacaaggaaatagccgaacttaagaagcagattgaagaattaaagggtggaaaataatatgcgtattattcagatgctgtcaacaatcgcatatggtgatgcggtaagtaatgacactatagctatggaaaaaattataaaagaaatgggatatgatacaaaaatatatgctgaaagtattgtaccgccgcttgataagaagacagctgttagcgtagataaacttactgatgtgcatcaggatgatataatcatatttcatatgtctactggtagtaagcttaattatgatgtagcaaagtataattgccgtaagatagtcgtttatcataatatcacacctccggaatattttaggaattgtgatgaacgttttacaaagatatgcgagtatggacttgaaggtgcaaaatatcttgctgataaagtggattattgtcttgcagtatctgagtttaataagcagaatctcatagatatgggatataagtgtgatatagacgttttacctattattattcctatgtcagattacgacaaaaaaccagacaaagatgtaataaaggaatattcggatggctataccaatattctttttacaggaagggttgcacctaacaagaaacatgagaatttaatagcagctttctattattacaatagattatataataataaatcaagacttatactagcaggctcctataaagagaatgatccgtattacatcagacttacagagtatactaagaaactaggtcttggagaagcaattgtgtttacaggccatatcaagtttaatcagatacttgcttattataaaacagcagatgtttttctgtgtatgagtgaacatgagggattctgtgttccattggtagaagcgatgaagtttaaggttcctataatagcatatgataaaactgcaatagcagatactatgggatataaaggaatgattatagacgataataatcctgtgtatgtagcaggatgtatagacagggttgtcagggataaggagctcagacagcagcttgtaaactggcagaatgaaagattacaaagttttgagtataataatatagctgaaatgtttaaaaaatatctcagggatttcattaataagaatagcaggaaatagtgtaaaaataagtttgatagcttatttatcacactcaggatttgtgtctgtacatgtttgacacaagctcgatatgcgcaaaaagcatgcgcagaaatgaggattagtatgaagaagataggatttgttattccatggtattataaagatatacgtggtggtgcagaacaggaattaagaggacttgtccagcatctgcatgctgccggggttgaggttgaagttataacaacatgcgtaaaggaatttgcatctgactggactgagaattatttcaaagaaggaacagaacagatagatggaataacagttagaagatttaaagtaagaaaaggaaatatgaaagatttccatagcgttaatgcaaagttaatgcagggaaagactatttcttatgaagaagaaacaacgttccttaaggagatggttaatagtccggatatgtatgattatcttagggaacatagtgaagattatcacaggtttgtttttattccttatatgtttggaacaacttattacggaattcagtcatgcccatttaaatcaatattaataccatgtcttcatgatgaggcttatgcttatttcagacatttcagagaaacattcagggatcttaggggaatagcatttaatgctagaccagagcaggagcttgccaatgaaatattagatttaagaggcgttaatcagttactattaggaataggtattgagacagactttgaatatgatgctgatagattcagaaaaaaatataagatcaattctccatatattatttatgcaggcagaaaagatgaagcgaaaaatattaatactcttatcagatatttcggggaatataaaaaaagaaattcggacaagattcctgatattaagttggttcttataggtggcggtgaagtgaatattccagacactattaagaatgatgtgattgatctggggtttgttgatatacaggacaaatatgatgcatgtgctggtgcgatatgtttatgccagccatctaagaatgaaagcttttctatagttattatggagagctggctgacagaaagaccagtacttgtgcatagtcagtgcaatgtaacaagtgattttgcaagagaatctaattctggcttgtattttgacaattattttgagtttgagggttgtcttaattactatatagataatccacagacggcatcgcagatgggtcattctggaagacaatttgttcttgataatttcaaatgggatgtagtacttaagaaatttatggatttcttagaattataattaagattattgtgacatatatgtgtgcaaattgtgtcgcaggctttgcgccaaaagcatacgcagaaatgaggattattatgaaaaagatagcgattattaaccagagatatggacttgaagttaatggtggttcagagttatattcaagagagatagctgaaagacttaaggctaagtatgaggttgaagttcttacttcatgtgcagtagagtatgttaagtggtctaattattataaagaaggcgttgaagacattaatggtgtgactgtaagaaggtttaagacagaacacgaaagaattcctaagatattctcagcacttgattctgagatgctttctaatccggatgcacctgtagaactttctgacagatggatagaacatatgggaccttattgtcctcagcttgttgaatatgtagatgaacatcaggatgaatatgaagctatcattgtagtaacttatctttattatacagcagttaagagtatagtaagaattaaggataaagcaatctttattccaacagcacatcaggaaccatttatacattttgatatgtataagaaggtgtttggtgcggctgatgcttttgttttccttacagatgaggagaaagatcttgttcattctatattccacaatgaagatgtaccatatgaagtatgtggagttggggttgatgtaccatctgaggtgagcgctgacagattcagaaagaaatatagccagtataatcttgataattatatcatctatgtcggtagaatagatgaaggtaaagactgtcctagattattcagatattttatggaatataaaaagagaaataaaaacagtgaccttaaacttgtacttatgggaaaagcagtatgtgatattcctaagcatccagatattattaatctgggatttgtaacagatgaggataagtttgatggtataagtggtgcaaaagcacttatgttaccatctaagtttgaaagtctttcaatatctgttcttgaagctatgacactttccaagccggttattgttaatggtatatgtgatgtgctgaaaggacattgcattaagagtaatggaggcttatattataagaatttctttgagtttgaaggatgcctcaattacttatatgaacatccggatgtatatgaaataatgtgtaaaaatgcacgaaagtatgtagatgattatttccagtgggatgatattatgaagaagtttgatgatattatagcaaaggtggggaaaactactgcataagaaaggtgaattatgaaacagaagttggttagctattttaaagaaaaatggcaggattatgccagttttatactaatgataattattatatttggcatgatgtatcatctgatggaattaagtaactgtgagcttaatataccacttttttatatgggtggagatgatatgggtgttattgtaaatgctaaacagtttacagaacaattctggaatctgacatgtgacagacttggcgctccttatacaatccaatattatgatttcacatcttccatgatgcataattctggactttttattatgaagatatttgctgtaattacaaaggatgctgcagtagcaatgaatctgacatatttatctatattttttatagcaggaataatatcttattttgttatgagaaatataaagataaactgttgggtagcatcacttagttcagctgtatttgcgttatcaccttatatgctgtttagaaatataggacatatagttcttacagaatgttattttgttcctttgtcaatacttttatgtatatggatatatgagagggatgacgtattaacattagataaagatttctttaaaagaaagattaattatgtagcattgtttttcacatttttaatagctaacaatggtatagcatattatccgttttttacatgttttatactgatggttacagccgtgtcaaagcttgccaaaacaggaaaaatcaagcagggtttacgtggcgttgtagcagtaataatggtatgcttttttgtagtattaagcatacttccaggtaaaatatataatataatgaatggaagcaatgcggctgctgtagacagatctggttttgaacagacagaattatatggattaaagattgcacagctttttatgccattaaatggtcatggatggtatgataaatacattgatatatataatgagaatgcatttcttgtaacagagaattcatcagcttatctcggaatattaggcatgataggtttcatagttctaatgttttgtctttttacaaagagagattcactgctaaagaagagattagcttgtctttcagaacttaacatatctatggttctattaggaacgataggtggacttggttcaatgtttgcattctttgtaagtccgatgctcagagcttataacagaatttctatatttatagaatatgttagtatattagctgttgccttacttgttaacgagcttatacgtgtaattaaagataacaaaaaggttgtttcggcatgggcaaaacgtatatctcttgttctaaccggctgtatatttggacttatgtgtttattcagcatatgggaaggatatcctcagcttgcaacaccagcatatgatactaataagatgaactatataagtgataaaaattttgttgagaatatagaaaacagtgttgaagctggctctatgatatatcagctgccatatcatgaatatccagaatatggacctgtcaatgatatgtgggattatcatttgtatataggttatcttcattctaaaacacttaaatggagttatggttctattaaaggaagagatgaagataaatggaataaaaatgttggttcgatgcctatagataagatggtttcatatcttaaagaacaggggtttgcaggaatatatatagatagaagagcatatgaagaagaggaacttactacgctggaaggttctcttaagcagatacttaatgaagaacctatgataagtgataatgaaaatcttagcttctttaaattttaatgtttgtaaaatgataaatgaaatagattagttacaagatatattttttctatataacggaggtgcgggatgaaaataagattggcagattatgttgcagaattccttgttaatcatggagtaacagatgtgttttctgtagttggtggaggtgctatgcaccttaatgatgcgctgggacacaatgaaaaccttaaagttacttataaccatcatgagcaggcatgcgctatagcagcagaggcttatgcaagaattgataacagaatagcggctgtatgtgtaactacaggtccgggaggaactaatgcacttactggagttgttggtggctggcttgattccatacctatgtttataataagtggtcaggtccgttatgacacaactgcaagatatgcgcttcagtatacagaaacccccttaagagctatgggagatcaggagtatgacatagttaaatctgtatccaatatgacaaagtatgcaactatgatagaggatcctaatgatataagatatgttcttgaaaaggcatggcatctggcaacaactggaagaccaggtccggtttggatagatattccagtgaatttccagggtggttttatagaaacagatgaattaaggggatatgatcctgcagaagatgataagcttctaccaccagaagttggaatggatataatagatgctgtacttgaaaagattaagaatgctaaaagaccggtttttcatgctggttatggtataagactttcaggtgcttatgatgtattcagaaaagttgctgatgaacttaacattccgatagtaacatattggaatgcagtagatctgatagaagatgaaagtcctctttactgtggaagagctggtaatatgggagacagaccgggaaactgggcaatacagaatgcggatcttattctggctgtaggtacaagaatatctataagacagacaggatataattggaagacatgggcaagagccgctgaagttataatggttgatatagataaagctgagttaaagaagcctactattcatgtagaaatgcctgtgtgggcggacgctaaggattttcttacaaagcttgagagtaaggcaaaggatatggcacctgtatcacatagtgatgaatggcttgctactacacagaaatggaagaagaattatccggtagtacagccaagacagtgggaagagaatggatgtactgctaatgtatatgcatttgtaagatatatgagcagtaagctgccagaaaacagccttactgcagtatctaacggagcatgttgtgttgttggaaatcaggcgtatgttatccagaagggaagcagaatggcaaataatagtgccattgcaagtatgggttatggacttccagctgcaataggaacatgcataggcggtaagagaagaccaactatatgtcttgaaggtgatggaagtattatgatgaatcttcaggaactccagacaatcataactaacaagcttccaatcaagatattccttataaataataatggatatcattcaataagacttacacagaataatctttttaaagaacattgtaagataggaataggtccagaatcgcatgacctttcattccctgaatttaaaaagattgcagaagctttcggttataaatattatagtgcttcatctaatgaagagatgaagaatgtagttgatgaagttcttaaggaagatggatctttattctgcgaaatatttacagataccaagcaggtatgggagccaaagagcagtacaaagagattagaagatggaacacttgtaagccctccacttgaggatttagcaccattccttcctagagaagaacttaagaaaataatgtttattccattaatggatgaggaataatagtgtaaaatacctgtgtaatgaggattagtataaaaagcatatgcagaattaaaggttggtaaaaaacatacgcagaaatgaggaatattatgagaaagataagtataatggtaccttgctataatgaggaagaaaatgttgtgccattaagtgaagcgttgattgatatgtttgctaaagatcttccaatgtatgattatgagatattatttattgataatgattcaaaagatactacgagggttaagttaagacagttatgtgagaataatacaaagataaaggctatatttaacgcaaagaattttggacagtttaattcaccttactatggaatattgcagacaacaggcgattgtacaattccagtatgtgctgattttcaggatcctatagatgttattccacgacttgttaagaagtgggaagaaggttacaagatagtatgtgctgttaagtcatcaagtaaggaaaatccagttatgtatttccttcgttcatgctattacaagcttataaagaaaatgtcatctgttgagcagatagaacattttacaggatttggtctgtatgataagtcttttgtaaaggtattaagagaccttaaggatcctattccttttattcgtggaatagttggtgaattagggtttaaaaagacagagattgagtatacacaggcacagagaagaactggtaagacacataataatttctttactttatatgatgctgctatgcttagctttacttcttacactaagattggtttaagactggcaacatttgttggtgcttttattggttttataagccttatagttgctattgtgtatcttgttcttaaacttgtgtattggaacagatttgcagcaggtatggcacctcttataatacttgtctgcttcctgggagctatgcagctcatattcataggtcttatgggtgagtatatacttagcatgaataaaagacttatgaacagaccgctggttgttgaggaagagagacttaattttgatgaagataatactaaataataaataggttttaaatttgatatgcataaaagatgagcgcagaaatggggattactatgactaacttagaaaaggcacataagataaacagaatacttatgagaaaattgcattcagtatgtgaagaatatggagttacatatttttatgattcaggtgctcttataggagcggtaagacatcatgattttataccatgggatgatgatattgatgtagcttttaccagagaagaatataataaacttaaatccatacctaaagaagcatggggagaggattttgaacttgttgaagttaaagatattgtaaaggacagcttctttgattttcctacaagacttgtttatcttggtgactcaatacctcttcaaagctatgataaagtaaaaggacatgttcaaaaaaagtatgaagataagatggtacttgattgttttgtacttgataatgcctatgattcaaagttaaaacagttaatattaagaatgcgacttacttttatatatggtcagtgtatgggtcacagggattctattgattattctgagtttggaacaattactggacttggtgtcagtttttttgcggctataggaagacacaggtcgcttgataagcttagggaaaagtattctagaatcagtcagtctgttaaaggaaatactaagcattatttttacagtaactatcctatgccagaacttaagaagtgggtggaaaaagactggtacagagaaacggtaccacttaaagtaggtgatgattactttaactgtccagtagaatatgataaagtactcaaggaatgttatggtgattatatgcagtttccacctgaagaaacaagagtacctatgcatgtaaagccagatgaacaatataattattaaataatattatcaaatattgatattgaggggattatggttagtgtaattaatacattaacattatataatgacagacaggaatattttactaaaatttctgcggaatggagagtatatgaaaataccagaaaagctaaaaggtattacaggcgattttatgtacagcatgatgggactcattgttatgaatggagtaatacagcttgcattatatccatttttaagtaagcagttaggaacagatgagtttggaattgttcttactcttatatctttcatatcaataatgggttcaacttttggtacggcagctaattattcacgaatggtaacaaggatgaaagggcaggatagtaatggagactataatatttttctgcttcttatagctgttttatcagttttcgtttctattggtggtcttgtatggcttcataagtttagcataatagcagaaattggttattttatacttatgatggtgacagtattaaggtattattctgatgttgagttcagacttaatcttaattataaaagattctttttattttatctgttcatatcagtaggatatcttataggtataggattattctttgttactcattcatggattattgctatgctttgtggtgaatgtcttgcagttggatttgttataatcactggaagtatatacaaaggggatcttttccataagagtgagtattttaaggataatatgagatctcttttaatactatctggaacagaacttatagcagctgttattcttaatgctgacagattaatacttcaggctattgatggaggaacatcagtaacaatattttatgctgcaacacttataggaaagatggtttcacttatatcaacaccacttaatggtgttataataggacatctcacgaagtatgaaggtggaataaagaaaagcacatttgtaaagctatgtcttggaagtgtggttggaagcctgattcttaatgtattctgttttggcgtttcatttgtgtttgtaagaataatgtatgcagatatatttgaacttgttaaaccatatttgtggtgtgctaatcttggacaggtattttatttcatcgccaatacattaacagtcatattgttaagatttactgaagaaaagtatcagcttgttattaatatattattccttatagtgtttgttgtgatagctatacctatgacaattgcattagggttatggggaatggcaatagctctggttgtggttaatcttattaaaatattaataattatggctgttggatgtgcaaagatataatttaaagaagaaaattaataaagttaaatggaaaaacttttaaaaagtaaaaatgtaaattaaattggagatttatgaaaaaaattattggatgtaaaaaagaaattataatatatttctttgctttattaattacaggattattttttggaaataatataattcagtatcagggaaaaaaagcagcattaattatattattatcaataacagcagctgttattgtgcttaccatattatctaaaatatttgttaatatgataggacagcttgcgatgggattgataccattttatctttttatcgcagtttcggttttatttaataatgataaatggaattatgagtcaaatttctcaaaaaagttaattatttgttttggtatttacacatttgtattagttatatctttgatagatatgtgttcacactacaataataacaaggtgtatgagtggataaaaagaaacagagtaatgcttattgttatggttataatatgtgtatccagaattccatttatgaatcttttacaaagatgggatgctggagagtattattacagaatgggactggcacttgagaattttgattattcagggatagatgtcttttttgataattatggtttatgtggacattcagcgtcattgttctgtatgatttatatgataggagaaatgatatatcctggacatattataggtgtttctattattaatcttatattaacagctataactatgtggtgtgtatataagattattattaagttgactagtagtgtttcaagaactttatgtgctatatatacgcttataatttcttttgcacctattgtatacacatttactatgcatcttaatcttgattatacgatggctatgttcgtgataatggttatatgctcttatatgtatgaaaaaccattattaacaggtatactatcaattatatgtttccagacaaaggagaatgcacttgttgtagttgctggtatagcacttggtgaaataataagacatatactcaaatatagaaaacaaagtctgaaagtaatatttacagatcttagattgtatgccacacttgctgcagccttagtccagtggatgtatttcagattatttggtaataactgggttgctacaggtgaacaggaagcaggtggattattcaaatggaataataatggttcggaatgtttaggttttaatccatcgttcattattatgaaatttaaacaacagtgtatattaaattttaactggattcctgttttgattataataactggtactatatatatagtttttaaccataaaaaactaaagaaaaatggtacttatatgatatgtccagttattggtgcacttgtaacacattctctgttttcatatctgtatataactggtacatgcacaagatataatataataagtgatatacttatatatattatcgccatatatgtaattaataaggttaaggaaatatatgactgtaaacatgacgtatcagataataaggtttacaataaagccaggaagatattagatagtgttttattatgtttatggtgtatgattcttgttatggaatgctttattacgatagatccgttatcaaatctggtgtttttaaatgctgattcagtgacacgtgatactcttattatgacaatggtcaatgatgagatgacatatggagaatctcttattcataatacacaatatcatggttatgacaagtcaatggatgttatgttaaagaatacagattatgacccggacacaacagatatttatctgtacgatgatgatggtgtgttcatatgcggtaatgttccattgtactatcttaactgggatatagttaagaaaaaacgagtattttacagtaataacaataccaaaaagatgaatgattatcatcttatatctactcttgctaaaaagggtgagaagatgcttaaagataataaactaaaagaaaaagcgttatttgttgtaacgacatattatgtagacagaagcattgatattaattattccttggatgtattaaacaggtattatgatatatcagaaagaaaaacggcttcaacatatcagggtggaatatattattatgaattgacattaaagtagaatggatgtgtgaataatataattaatagctaataataaatattagctgataaatatgacctgattaattttaaatttatagggagttgatcatgatatcaaagagtagtcttattaaatcaaagaaattttatgagattgttttcttatgttgtgcattggcaggtataatagcctgggcagcaggtatagtgctttttggaagtgatggaagacaatttgatatatttttccgtaatacagaagatttttttgcagatataactaatgtaataggttattcggcaaacaggaatacgtatgtagaaacttattatcttggcgcatgtgagagggcttatccggctattgtatatcttatggcttatatgttatcaagaataatagatatgcagccttattttgataatgattactttctggatatgtatcaggatacgcgcatattaataattatcatacttatacttatagttaatatgattgcattatatgaacttataagaagttgcaagaatggcaataaagcggtaaagataatgacatctatagcattctgtctgtctatgccagttatatttacaatagaaagagctaactttttattgatgacattattctttattctcttttatatatttaattatgatagtgagaataaaactagaagagaattagcacttatatcgcttgctatggcatcagcactaaagcttacaccagctgtgcttggaatattacttttatataacaaacaatggaaggaagctataagaacagtaatatatggtttgatattaggaatggtaccattcctgtttttccatggtggacttgttaatataggaagaatgttccataatgcagcattaaatgtccaggcatattcaagtactgaaggaactacaatagtagctgcgttagtcgcttttggggttaatgcaaccgatgggatgataaagattgtaaaatgtataacatatgttatagttttattgctatttatacagtgtcttttttataaggaaaaatgggaagttattatggcagtttcaatggttcttataatagcgccttctcattcaggatactattgcataatgtatcttataccagccgcgattgcgtttcttaatgcgaaagaacattcatattcggatttactgatactattttcgattattcttattgttatggattttcaatgtgatttatttgaatatgtattgaattatcatcttgccataatgcttatacttgcagttttgcttataagaggattcgtgcggatgtatgatgttataaaacataagtcagataacagcatggctaagtaacatataaaggttaaggtaaaacaccagagggtaaatatcctctggtgtttttatattgtgtaaaataagtaagaataattacaagcttaatataatttattcaatgctcgcaataaaatcttaaaaagtcttaatattatattaattatttacacataattatacttgttttctttaaaatactttactaattatataatttatgttagtattatcaattgtgaatgtgaaaaaaatgtgaaatatataaaaaaggagttaaatatgaatgtgttatcaagtgcattaggatatgtaatggccttttgctataagattataagtaattatggaattgcaattattctttttacacttataagtaaattcgtgcttttgccagtatctatatgggttcagaaaaattccattaagatggttaagatgcagcctgatattaacaggataaaagcaaaacattttggggataaagattcaatagctgatgaacagtcaaagctttttaagaaagaaaaatataatccattggcatcacttattccattggctgtacagattattctattacttggcttagtggcagttatatatcatccgttggattatcttcttcatttgccatcagatgttatagatgcatttaattcattaatagtttcacttacaggggtagatcctgaatcatcgtctattcagcttgctgtagttgaaagtattaagaatggaacatatgaaagccagtttcttgcactccagtcacagtttaatggtgttgatatagctgggattcttgcagaggttaagactcttaatatgaatttcttaggaattaatcttagctgggttccatcagaagtaggtgggatagatattattgtacctgtaatagctggattttctgcatggcttttatgtgttgcacagaatgccagtaatgtattacaggcagagcagtctaaacttaacaaatatggcatgatgattttatcagttggtctttcattatatcttggctggtttgtgccagcaggtgtagccttatattggattgcaagtaatatatttgctattgtacagttatatcttcttaactgggcaattaatcctaagaaatacgttgattatgaagaccttgaggagagtaagaaagagcttgcagcacttgaaggcataggtggaaattctggcaagaagaagctctttgaaaaaaatccatatgcaaagagggagaaagctgattataagagatttttctctgttgttaataagcatcttgtattctattctgaaaataatggattttacaaatactatgccggaatgattgaatatattcttaagaataccaacatagtaatacattacataacaagtgatcctgatgattctatctttaagaaggcagaagaaaatagccgtattaaagcatattatataggtgaaaagaaacttataacactgatgatgaagcttgatgcagatgttgttgtaatgactatgcctgatcttgagaattatcatataaaaagaagctatataagaaaagatattgaatatatatacataccacatggaatggatagtctgaatatgacaatgagaacaggttctatggatcattttgatactgtattctgtacgggtaagcatcaaaaggaagaaattgaaaaaacagaaaaggtatatgaacttcctaaaaaaaatcttgttgaatggggatattgcctgcttgattcaatgagagatgattacaataaaatggagaagaaggtttctgatgttaaatctatccttattgctccatcatggcagaaagataatatagttgatagttgtctggatgaattgttagataatcttaaaggacatggttataagataacagtaagacctcatccacagcatgtaagacatatgccagaacgtatgcaacagcttaaagaccgcttcgctaatgatgatgatatagaaattcagacagatttttcatctaatagtacagtttttgaagcagatatgatgataactgactggtctggaatatgttacgaatatgcatatacaacttgtaagcctgtattgtttatagatacaccaatgaaggtaatgaatcctgaatatgaaaagataggtgtagagcctattaatatatggatgagagacagcataggtgcttcattgaaacctgatgagatggatagaattccagaagtggtagatcagatattaaaacatacagaagattataagcaaaaaattgatgagtttgttcatgaatatgtatataatcttggaaacagtgcacaggtaggtgcagattatattattaacgctgttgtaagaaaaattaacgataaaaagaataaagaatccaaataattattgaggaggagtttatgagagatgataacaatccggctgaaaagtcaaaaaagaaatatagttttgtagaaagaatacttttgcttttacctccaacaatatttcttatatttacatttgctatatatatgccaagttccttattcataagtaatattgatgactttgcacttgattacataaagattgttccattgattgcgcttgtttcagttgctgtattggtaattgtatatataattggattaattataccaatcaaaagattattttattcatatgtattacttgtatttagcctggcattaggattttatattcaggggaatttccttaatccggcctttaattcactcaatggtaaggaaattgcctggtcacagtataagataaatggcattataagcataattgcctggatattggtttttgtagtgcctcaggttgtttatgctataaaagaaaatattatgtcacttattgtaaaatggggaagtctgtttgtaacagcaatgcagcttgtttcacttgttgtattattattaactacacataaggtagtatctaacgattttgctgttactaaaaatggtgaatttgaattgtcttcaaaaaataatacaattatgtttgttgtggatacacttgacgcaagctggtttgaagacatgcttcttccaaatgaagaatataaggaatcattaaaagattttacatattttgatgacgcagttgcgggtggtgctcctacagtacttggtattccaacattacttacaggaaaaatagatatggatgcctcacgtgatacaagtgagtattataaagatgcatatgaaagttcttctttgtttgcggatatgcagaagagtaattgtaatgttaaactttttactgaattttattaccttgactattgcgataaaaatagtgttgataatcttaaaatggaacagaaatatgtcatttcttcaagaagaggttttatggaatgtctttataagtttgtttcattttatgctatgccacagtttttgaaacagaatttctggttatattctggtgaatttaatcagtatattacgttggaagataatacttctaatctttataagcttgatgatgcacaattctatcaagattttaaggaaaaaggcataacaacccaaaacgataaggatacttttgtaatgtatcatcttaatggagctcatagtccatatgtcatggacgaaaatgcacaggctgttccttcagattcgataggtgtagatagccagataagaggtatcttcaaaattataaaggaatatatggatgagcttaaagcaaagggaatatatgacagcagtactattataataacggcagatcatggaggaattgacctttattctaatcctgcaattcttgttaaagaaagaaatgctaatcatgatgagatggttgtaagtgattcaaagattacatttacaaatgtaaacaatactatcgcttcctcaactttaaaagattcatcagcttatggtgaaaatgtgtttgaagttggagataagcagatggtcagattccatgtagcacctaatgacctcacagagaatgtatttaaggataatgcatatgcgaaggaacaattatggtcattacttattataccggcagataagcgtgccgatgaaataggctcttttattcttgtgccatacgatcagtatgatgaaatgataaaaaaatataatgtacaaaataattagtaataataaatctaatataggaggaaaatcaaaatgataatgtttacaaatatggtaagtgggtatctcgatccatcagttatgacatacgccattcaggcgattgcaggtgttgtaattgcaataggtgctgttgcaggtatttattggagaaaggcaaagaaaaaggttagtgataagcttggtatagatgaaaacaaaaacaaagaagttgaaggcgatgatattataattaatacaaagtctgaagataagtaattgtatgttctataatttggaatcaaaaagtccagagtgtaatactttggactttttgattaattattattgtattttgtaaaataacaaatatagatattcatgttatcaaatcataaaaatgtgttacgaatgttaagaaatacttaaaattatatgaagaaatatttactttttatataggatgatgtatactttaacagttcactttactaatactatacatataataataatgttaaaatgttatgtgaacaatacaatatttgaacaattttttaataaggatattgtatatattaatgagcaaaaggagaagacaatgggagataacaaattggtcagggctcttgggttaaaagaagcaattagtatgactataggaacggtagttggagttggattatttacgtgtggttcagcacagataggaagtgtaggctcatggattatagcatttacatttatagcactattaatatcaatatggccatgtcttatctatggtgaaatgtcagcagcgcttccatgtgcgggaggaacttataattatgctaaaagaggattaaacagaatatgggctaatcttgctggatggcattatatagtatcggtagttgctataggagctggtgaaaccttagcatttgctaattattttaaaatattacttgatcagcttggagttgatatagtatggttggattcaagaattattgccattattcttgttgcagtatttcttgtattgaatttcagggggattgagcagtctggaaaagcacagacagcatttatgtttttcttctggggatgttcagtgtgttggtttttatatatgattcctaaggtacatctcgaatattttggtggaattgctatgaattcattaccaccttttaatgaaatgatgtatatatttggtcttgtatggtggtgttatactggttttgaaacatgtgtttcaatgggtgcagagactaaatatccacagtatacattaccaagagcattgaaaatttctgtatttatggtatttgcacttaatgcattattccagtggtttttagttggtcttgtaccaaaagagttttacggtgtgcttgcagtggctaatgcaccatatgcggaagggttaaaggcagtaggattaataggtttccctataattttgctttgtataggaatagcattcggtggtgatttatctacaattaatccaggaattgctgcaccagcgagatatatatatactatggccgaggatggagcattgcctaaattcctgggtaagattcatccaaagtataagacaccttatatagcagtaattgcagttggagtaattaatttcatattaattgctacaggatctattgactatatagcctctgtttcgcttatttcactggctatatgttatatgattggatgcttatcatatataggtcttaagaaaaaatatcctgatatgaaaagaccatataaggcaccacttggggttgttggatgtgtcgttactatagttttatatgtttttatgcttatattcgcagacaaaatggcacttcttacatctggaataataacggttgcatgtataatattctattatttatattcacataaaaaagaatttaagatgccatctattgaagaagaaatcggtattattgaagaaccagatgaagaaacaaaaaagaagatggataaacaatacaatatttggaaagtatgtacaattatagttacatgtatagcattgggcatatatatcatacctatgatagttaaataagttatatgtaaaatagtgtgtacagaaatgaggattattatgaatcgttatcagtttgaagttcttgcatttcttgaaaaaaatggaaagaatgtttatgcaatcagaacactttcagataaattaaaaatatcaggtactgaggttagtaaggcacttgatgagttgaccaatataggtgcaatattaagaaatgaaaacctgttagaaattacagctaaaggtcttgatatgcttgagccatatagagtaaaaagggcggttataatggctgctggttttggttcaagaatggttccagtaacactggacaggccaaagccaatggttaaagtcaatggtgtgagaataatagatacacttttagatgcattagtatcagtcggaataaaagatataactctggtaagaggatacaagaaagaaaaatttgatgaaattactgataaatatccttttattaagtttgttgataatgatgtgtatgataaaacaaacaatatatcatcagctatggctgctcttgagaatattgatgaatgttatttatgtgaggcagacttatatatatctaatccggatataattagtaagtatcagtatagcagtaacattcttggatcattctcaatagaaacagatgattggagttataaacttgataacggttatataactgattacaaaaaaggtaatacgttttgttttaattattatggtatatcatattggaataaagatgatagtaaaaaattacgaaatgattttaaacaggtgtatgaagaggaacaagatggtaaggattatttctgggaatttataccattggtattacgcaaagaaagatataatgttgaagtaagaccatgtgagaagtcagatataatggaaatagataatttctatgaacttgtgcagctggattcttcatataaagattatcctggacaggaataaaagtttaattacattggaggtattcactgtgaaaaagaatgaattttatatattgaacagtttatataacggaagtataggccgtgcggattgttcgtatgcattagattgtgtcagagccttatctgataccagagcatataacagattagttcatgcaggatatattgataaagagagtggatgtcttactgaattaggtattaaagctttagagccatataaggttaataatgcagttattcttgcagctggttcatcaacaagatttattcctttatcactggaacagccgaaaggtttgtttgaagtaaggggagaaaagctgattgaaagacagatagaacaacttcaaaatgcaggaattaagaatattacgatagttcttggatataagaaggaaatgtttttctatctcgaggataagtatggcgttaaacttattattaatgattcatttaatattaagaataatatagaaagcctgtatcttgcaaaagaagaattaaagaatacatacatatgtgtaagtgacagttactatatagagaatccatttaatcaatatgagtatattacatattactcaggttatcgtggaaatcttattactgaagagatatatgctgatgtcgactcagatggtaaaatagtctgcatggataataaaccaatagataatggttatattcttatgggacattcattttggaaaaaagagttttctgattcatttattaatgtaatggaagatatcagagatgatggaaaatataataattcttattgggaaatccttttaaaagataagctttctgatttaccatcaatgtatgtgagagagtataaaaaaggaaatatatttgaatttgattattttgaagagttaagaaagtttgattcgcaatatttaggttatacacatagtgaaataataagaaatattaagcttgtattcagatgcgatgaagaagatatagttgactttagaaatgtaagtgaaggtatgactaatatatctttcatattcaagattgatggagtggattatatatacaggcatccaggtgatggaacagaaagtataattaatagaaaaaatgaaaaaaaatcacttattttagctaaaaaaataggaattgatccaacatatatatatgcagatgtgaatgaaggatggaaaatttctgtatttatatcagaattccgtgaaccagactataattcttttgaagattctaaaaagatactttcagtgctaagaaaattgcataaggcagatattaaagttgattatggtatgaaaccatgggaagatgctcttgagatggaagctttgattaagaaaaaagattccgattgctttaaagaatatgaacagttaaaattaaagatagaaaagctttataatatgacacttggcgatggagtagataaatgcttttgtcatggtgatacatataaacctaattggatgataaaaccagatggaagtgttatacttattgactgggagtatggtggatattcagatcctggaattgatgtaggttattatattgtagatgcaatgtatgattttgataaggcagaagaatttataaaagagtatcttcaggaagaatatagtgagaaaacaagatttcattacatggcctatgttgcaataatagcatattattggtttgtatgggcaatttatcgcgagctgtgtggtgccaatataggagaagctttaattaattggcgcaaaatggcagaaatatactctgattatcttttgaataattaaaaaatatttgttaatgataaaagctgtagtttatgtgtaaaatgaattacagcttttataattttgtgttgtttataataccgtttgagccggtttaattgacaaaatgtgcagtatgagatataattttccagcgtatatgtgtgaagtctacatatatttgatacaaactcgatatgcacaaaaggtgcgcagaaatggcaattaatatatttatttatataagaaatgaggtatatcatgaagaaaacagcgttaataatggcaggtggaaaaggggaaagattctggccaagaagcagagttaaccttcctaagcagtttttatcattaacagatgatggaaagacaatgattcagcttacggttgagagaatcagtccattagttgatattaaggacgtatatattgcaacgaatgctaattataaggaacttgtaaagcagcagcttccaggtcttcctgaggagaatattttatgtgagcctattggaagaaatacagctccatgtataggacttggtgcagttcatgtggcaagcaagtatgatgatgcggttatgatagttcttccatcagaccatcttataaagcacaatgatatatttaaggatacatttgttaatgcatgtgatatagcagagaagggtgagaaccttgtaactgttggtattacacctaattacccagaaacaggttatggttatataaagtataacaaggataataaagagggtgagagcttttcagtagagaagttcgtagaaaagccagatcttgatacagctaaggcatatcttgcagatggttcttatctttggaactcaggtatgtttgtatggaaggtatcgactatactttcatgctttaagaagtatatgacttcaacatatgaaggattattaaagatcaaagaatcagttggtacagcagattatcagaatactcttgaaaaggaattccctaatcttgaatcacagtcagttgactatggtatcatggagaaggcttctgatatatacacgcttgctggtaattttggctgggatgatgttggctcatggcttgcagtaggaagaatcaaagaaaatgattcagaaggtaatgttgtgaatggcaatgttgttacagtcaatacacagaactgtgttattgaaggtgcagacaagcttatcgcaactgtaggattaagagacatgatagttgttgatactaaggatgctacactcatttctactaaggagaacgcaggtgagataaagaaagtacttgctaaacttagagaagagggaaagaatcagtatttataatttggtaaatatataatgatttaagtgtggaaactataaaagttaatttagctttcgtgaaaatacttgcaatatgccagacacaggtaatatgattttgtggtaaggtgttttgtgcgagtttaaagcgtatatttttatttatagaaatggagattaattatgaaaaacgcattaattacaggtataacaggacaggatggttcatatttagcagagcttcttcttgaaaagggctataatgtatatggtcttatgagaagaaagagtgttgtggattacggaaacgtagatcatatcaaggataagattcactttatctacgcagatatgcaggatatagtatcacttatatcagcaatgaagatatcacaggcagatgaagtatataatcttgcagcacaatcatttgttgcaacatcatgggatacaccatgtacaacagctgatattgatgctattggtgttactaacatgcttgaagctataagaatcgtaaagccagagtgcagattctaccaggcatcaacatcagagatgtttggtaaggtgcaggctatacctcagacagaggatacacctttctatccaagaagcccatacggagttgctaagctttacggacattggataacaaagaactatagagaaagctacaatatgtatgcttgttcaggaatccttttcaaccatgaatcagaaagaagaggaaaagagttcgttacaagaaagattactaatgctgtagcacgtattaagttaggacttcaggattgtgtagaacttggtaatcttgatgcaaagagagactggggtcactcaaaggattatgttagggctatgtggttacttttacagcaggatgagccagatgattatgtaattgctactaatgaaacaagaacagtaagagaattcgctaagacagcatttgcagcagcaggaattgaagttgagtttgagggtgaaggtgttaatgaaatagcaaaggataaggcaacaggtaaggttgtacttaaggttaatccagatttcttcagaccagcagaagttgaacttcttattggtaatccagctaaggcagagtcaaagcttggatggaagagagaaatatcattccaggaattagttgaaagaatggttaagaatgatcttgaacttgttaagaaagaagctgctaataattaataaatataatgatgtttatagtcagggcagagaatgattaatctgtcctgacaatatttaatgtagcagaagagaggtagttaatgaaggcattagtagttggcgggggtggatttgtcggaccatatctcgtaagacacttaactaaagatcttggatatgatgtgacagttaccaagacggagaaagaaactcttacaatagattcagcagttgtaaggaatctggatattctggataaggatcggatatcagagcttcttagtgaggaaaaaccagattatttattccatcttgcagcccagtcttcggttgcttattcatggaagaatcctacactgacagtagatgtaaacataaagggttgtgtgaatttattagaagcggtaaaggatgctgataaaaagccaagagtgcttcttataggttcaggtgaggaatatggacatataaagaaagatgaatgtcctatcatagaagataatgtgttaagacctggaaatatatatgcagcaacaaagtcatgtcagaatatgttaggaaagatatattcagatgcatatggacttgatgttatgatggtaagggcatttaatcatattggaccaaaccagacacctatgtttgtggttgctgatttctgtaagcaggttgcagatatagaaaaaggaaaacaggaaccagtaatatatgttggaaatttaagtgcaaaacgtgatttcacagatgtaagggatgttgtaaaggcttatgcacttcttgttaaaaatggcagacgtggagaaacatacaatgttggaacaggacatgccattgaaatcagacagatacttgacgagattatagcaatgtcagacagagatattgaagttaaaattgatgaaaaaaaacttcgtcctgttgatgttccgattatagagcctgatatagataagattaggaaagaagttggttggcagccggtcatttcattaaaacagactcttaaagaaacacttgaatattggagaagtgttgattaa

SEQ ID NO: 1165 - DNA, 23663 bp, unidentified
  source 1..23663: mol_type = unassigned DNA
ttcctcattttcaccggcacggactttggctccatgaagctcaacgaggacaacgccaaaaacggcgacctgtttaccaccgccgaccgtccctacggcaacgatgtggacgatggcaccgatacctgcggccatgttgcagacctgctcgccccggtgctggtgctgatcgtggcctgcatcttcggcatgatctacaccggcggcttctttgagggcgtggacttcgttaccgcctttgcggactgcaacgcttctgcaggtctggtgctgggcagcagcattgccctgctgtttacctttgtgttctaccgcgtgcgcaatgtgatgacctttcaggactttgccgcctgcattcccgagggcttcaaggccatggtcagccccatgctgatcctctccctcgcatggaccctgtccggcatgaccggcctgctgggcgcaaaatattacgttgccaacctgctgagtggctctgctgcagcgctgcagtacatgctgccggtcatcatcttccttgtggcagtgttccttgcctttgccaccggcacgagctggggcaccttctccatcctcatccccatcgtgtgccatgccttcccggagggcgagatgctggtcatttccattgcggcctgcctgtccggtgccgtctgcggtgaccactgctcccccatctcggacaccaccatcatggcatccgccggtgcccactgcagccatgtgaaccatgtgtccacccagctgccctacgccattacggcggcttcctgcgcggcagtgtgctatgtgatcacgggcgttgcacaggctttccttggtgccaacggcagcctgttcacctcgctgatcctgctggccgttgccattgccgtagagctggtggtgctcagcgtgatccgtgtgcgcacgaacaaaaaggcggcagaataaattcctgccaaaaattcagctgtttcgctttgcgccgcggccaaaacgtggtatttttaaataaaatgaactatcggaggcacacgacctatgctggaacaggcatttcaggacgtatacaccaaattcaagctgcatttctaccagaacatttttcagcgttttgccacccgggaagccacgctgaccacggtggagtccttctgcatggagggcatcatggctatgggcgaacccaccattgcggagttttcccgcatgatgcagatctccacccccaacgcagcgtataagatcggcagtctggtgaagaagggctatgtggaaaagatccagtccaccaccgaccggcgcgagtatcacctgcgccccacccagaagtatatcgattactacaacatcagctattcctatctgcacactgtggtggagcgcgcaagagagcgcttctcacccgaggactgtgcaaagctggaggagatgctcaccattgtgagcaccgagctgatgcccgagttggatatgctcaagaaggacgaaaaggcagaataagcaacaaagaactcccggacatccgtccgggagttcttttgtttccccttacttctgctctttatctactacctggatcctgcccttcttccacagcacataggaggtaaggatgccgatgggcagcatcacgatgatgaagatgcccacaaggccgcccagcacggagccgtagcctgcaaggcgtgcggcgagggagagcaccgtcatgatgatgagcaccggcagcacgcccttgatgccgcccttgaccaccttgctgccgctggcagagctggcgaacaggcccagcgccatggagccgaacagggacggcaggggaatcctttagaggaaaattgatttccttgtttgttttcggatacgcctttgcaaaagccgtgaaacctgctataataatacagacatctacatatcgaaaaagtgggtttgacggcagcactgcggctgcggtcaaaggccctatgctgttttttttttgagggaaaggccaatggaacacgtaaccgaacaacaactgacaaggaggcagagcaccgtatggcgggcactgcgtgccgccgcaccgcagaccattccggtgctggcgggctattttgtgctggggatgggctatggcatttatgtgcagtcgctgggcctgccggtgtggatgcccatgctcatgggcaccgtggtgtacggcggttcgctggaatttgtgctggcaagcctgctgctgagcgcgttctcgcccctttcggccttcttgatggcgctgatgatccaggcgcggcatctgttctacggccttgccatgctggagcgctacaagggctacggcctgcgcagcttttatatgatctttgccatgagcgacgagaccttttccatcacctgttcggccgagccgccggaaggggtggacaggggctggttcatgttcttcatcaccctgctggatcagtgctactgggtggccagtgccggtcttggcgcggtggtgggctcggtgctgcccttcagcaccgagggtgtggactttgtgatgaccgccatgttcacggtgatcttcctcaaccagtgggaaaaggaccggcagcactacagcgccctgatcggccttgccgccccgctggtgtgtctggctgtttttggctccagcagctttttgctgccctccatgggatgcatcctgatcctgcttctggccctgcgtaaaccgatcgaaaaggccgaaggcaccgaagcagaaaaaagcggcgaggaggtgggcgcatgaccgcagtccagatgggcctgaccattgcagtgtgcaccgccgccaccatgctcacccgctttctgccctttgtggtgttctcttccaaggatcagcagccgccggaggtggtgcggtatctgggccgggtgctgcccgccgccatctttggtatgctgatcgtctactgcctgaaaagcgtcaccccctttgcgggcagccgcggcattccggaggccatcgccctgctggtgacggtgggcctgcacaagtggaagcatgagaccctgctcagtgtcgcaggcggtacgctgtgctatgtgctgctggtgcagctggtgttctgaaagaaaaaagcgcgctgccgagcaggaagattcctgtacgacagcgcgtttgtgcatgggacgatccgctgacagcgaaccggagcgggaccgtccgaaaaaccgatgctttgcgacccggtcacggaaatttttcaaaaaaaggtgtatactgtagaaaaatgcatccgaaggagggttttcccatgcccagcatcatcattataggttccggcccggcaggcgtatccgccgcgctgtacgctgtccgcgccggtgtggataccacggtgctcaccaaaggccccggtgcgctggaccgcgccgaaaaaattgaaaactattacggctttgccgagccggtctccggtgcggaactggaacgccgcagcatcgagaatgcaaagcgccttggtgtgagattcgtcacagccgaagccgtgggcctgacctatatggataaactcaccgtagaaacagtggataaaaattacccggcggacgctgtgatccttgccacgggtgcatcccgggcggtgccgcgcatcccgggccttgccgggttggaggggcacggcgtgagctattgtgccgcctgcgacgcctttttctaccgtggaaaggacgtggcggtgctgggcagcggcgagtacgccctgcacgaggtgcaggctctgctgccggtggcaaaaagcgttgtcctgctgaccaacggcgcaccgctgacggcggacttcccgctggaggtcacagtctatccgcaggccgtgggggctgttctgggcgaaaccgttgtcaccggcgtgcagctgtccggcggtgtgcagctgcctgtcagcggtgtatttgtggcactgggcgtggcgggcagcaccgcactggctaggaagatcggcgcagaggtggacgggaaccgcatcgtggtggacgaaaaaatgcaaaccaccgtgcccggcctgtatgcggcgggcgactgcaccgggggccttctgcaggtggcaaaggccgtgtatgagggcgcgcaggcgggcactgaagccgccaaggccctgcggaaaggatgaaaagcaatgtcggaaacaacaaaggaacaccgcgattgtctggccaaaggttttcccttctggaacgacctgacaccagacgaacaggacatgctctgccgctatacccgtccggtgcactacgcaaagggggcaagggtgcacagcccgctggaaagctgtgtgggcatcctgctgctgcgctcgggccagctgcgggcctacctgctctcggaggacgggcgggacgtgacgctctaccgcctgttcggcggagaggtgtgcatcctgtcggcctcctgcgtgatggactcggtgaacatcgacctgtatattgatgccgaagaggacaccgaggcctactgcatcagcgcgggcgttttccgcaggctgatgcagcagaacgtgcatgtgcgctgctacgcctaccagatgacggcggagcgcttttccgacagcatgtggaccatgcagcaggtgttgttcatgagcgcagaccgcaggcttgccatttttcttaccgatgagctggccaagaccggcggtgacgaggtgcgcatgacccacgatcagatggcaaaatacatggggtctgcccgcgaggtggtgagccggatgctgaaatactttgcgcaggagggctgggtgcggctgttccggggcggcgtgcaggtgctggacaggaaaaagctgcagcagctggcaagaggacaataacaaaaaaggggcgatgtgaacatcacatcgtccctttttgggtcataggttatcctttgcagccctgttcttcccagtcgccaaagtcgctggcttcggcaatcttggtggggtcgaattttccgctctcgtctttgggagcaacggcggggcctgcttccacagggttctggttgggagcttccgggtcgaacaccggcttctcaccgccctctgcgggtgccgccggggcagagtcttcttcggcgggctgggcagcagctgccgcttcttcggcaggagcttccggcgcaacttcttctgcagccttttcgttggcagcatcggaggctttggtttccgcttcggcgtaggcttcggcagtcttggcggcttcctcagcgttctgctcggcgtcctccgggaactctacttcctccacatggagcgggtctttctggttcaggatcttgtccagtgccacaatggcagcaccggtaacggccaccgcagcggccgtgccaaggatacgaaacagtgttttcatgccgggacctccttgaaagatcagatcaagagaatgttaccacatcgttcagcggcttttcggcaggctccaccgaaatggcggtgagcaccgggcctttgccgcggtagatgttgtggaacttgtagcctacctttgcggtcacccgcacccatgcgcgttgctccagcgccttgtagccatcgtagctgcagggaaagcccacgaactggatgtcctgcacgcagcaggtcatggcgaaacggcccggcacgaagctgttcttgccggcacggttggtctgacacacctgtgcaaggaatttgaccgttttgccggtatacttctggggctcgtcctgacagtccatgtaccagatgccgaaatcgtcatccggaatgtcgatggtgtccgcgttgatgtcaaagggcagcgggtcggggatatcgtcgtaggccacgctgccgtcggcaaactcgtaggcgatatcgcacttgcgggaagcctgacgcaccagcttgtgcagctcctgacgggcggcatcgttgttcacggcctcagcgcggttgaacacgatcagctcactgcgggcgatcttgtccagcagcaggctgcgcatggagttgtcgcgggcgtaggtcagggcggtggtgccgtcggcggtggcgatgcactggtacacgatccagctctcgggcagagcctcggccagatcctgcagcagccacatgccgttgtactcaatgaccacacggcctgcaccggattccttttccagcttgagcagattctgcgggttcagctcggccttgtcctccagcaccttaacggtcacgccgggaaaggcgaacttcttctcgttgtactcctcttcgccctcctcgcagatcagcagcagggtcttgtcgccggagtcgaagttggggtcttcaaaggtctcctgaatgaatttggtcttgccgctttccagaaagcccacaaacaggtagaccggaatttcttttgccataggaatggtttctcctttttactttaagctcagcagccgaacagctctgcaatggccttttcgttcagcttggagccgatcacgaccagcttgccgcccacatctgcaccgcgggcacgcacttcccattcgccgggcacatagtcgaactccagccagccgtctgcgccgccgttcacgatgcccttgctgcgcaggatcatgccgtaattgccggtatccagctcggtgagggcgtgctccacttctgccttggtgaatttgcgggccgtctcgacgccccagctggtgaacacctcgtcggcgtcgtggtcatgatgatggtgatggccgcagcagcagtggccgtcatggtcgtgatgatgctcgtgctcgtcgtcatcatcatcgtcatcatcgtggtcgtgatggtggccgcagcagcaatggtcgtggtcgtcatgatcgtggtgatgatggtgctcatgctcatcgtgatcatcatcttcatcgtgatcgtggtgatgctcgtgctcgtcctcgtcgtcatcatcgtggtcgtgatgatggccgcagctgcacacaccgttttcgtcatcgtggtgatgatggtggtgatgctcttcttcctcgtcctcgtgggagtgctcctcattggcctttgcagccatggcgatcagctctgccttgaagtcgtccttggtggacatggccttcaggatctgctcaccggtcagctcgtcccatgcggtggtcacgatggtagcggtggggttcttctcgcgcagcatggcgaccgcagcggcgatcttctcttcgctggcggtctgggtgcggctgagcaggatgcagcttgcgtggctgatctggtcatcgtagaattcgccgaagttcttcatatacatcttgactttgttcacatcggccacggtgacaaagctgttcagctgcacatccagatgctcagccacgccttccacagcgcgggtcacatcggagagcttgcccacgccggagggctcgatgacgatgcggtcggggtggtactgctccaccacctgctgcagggcggtgcggaagtcgcccaccagagagcagcagatgcagccggcgttcagctcgttgatctggatgccgctttccttcagaaagccgccgtcaatgccgatctcgccgaactcgttctcgatcagcaccacctgctggccggcaaaggcctctttgatgagctttttgatcagggtagttttaccggcaccaaggaagccggagaaaatatcgattttggtcatgattcaattgcctctttcttcgaatagcacacagagccgcagagtgctggctcaaaaaacttacactcctattataacaaggctgtcaatgggaaaaccgcctttttcaagaaaaaattgtaactttttttgcaaattggcggcattttgagggagaacgaactccctcagtcaaaacctgacggttttgctgagaggacgccaaccctctcaggctcactgcgttcgccagccgttcccctttctggcttcgccatcttcccccggccgggggaagtcgttccactcagggggagctttttgttttctgaaggtcggcacgaataaagctccccctttcgggggagctggcaaagccgcaaggctttgactgagagggtccagccagcgaggatgctctccggcagcggaggtcattccaaaccgtcccgcccctgcattgcaatctttttcccggaatgatacaataaggccaaacagaaatgcaccgctgccgggctttccggtgagagaaaaggaagcaaatcatatgagcatgaataccgttccagagcgccttgccgcgctgcgtgccgccatggctgcaaacggcgtggccgtttatctgatccctgtgggtgatccccacgccagcgaatacctgccctgccattacaccagcctgacctggttctccgggttccacggcgagaattccaacttcgtggtcacccgtaccgagagcgccctgtgggccgacggccgttattttgtgcaggccgagaaggaaattgcgggtaccgagatcaagctgcagcgcatgggggaacccggcgtgcccaccgtggaggaatactgcgcaaatgccctgaatgagggcgaagcactgggcctgtgcggcctgaccgccagcacggccctcgtgaacgatctgaaaaaggcactggaaaagaagggcgcttccatcaagaccctgaaccttgaggacgagctgtggacggagggccgccctgccctgccggataccccagcgtggatcctgccgaaggaatatgcgggcttctccccggcggaaaagctggatcagctgcgcagcaagctcaaggagctgggctgcaccgctcagtttgtgggcaagctggataatctggcatggcttttgaacctgcgcgccatggacattgagtgcactccctatgccatggcctactgctatgtgacccgcagccgcgcggtactcttcatcaacacggcccgcgtcaccccggaggcaaaggcagagctggaagccaacggcatcacgctggcggagtatgatgatgtgctgaagttcctcgctgctgagacggaaccccagaccgtgctggccgagtgctccacggtgaactacgccgtgtatcaggtgctggagcagaaccctgccctcaccgtgaaggacggcaccgacccgctgctgatgatgaagggcgtgaagaacgaaacggagcttgcccacacaaagcaggcccatatccgggacgctgtggccatggtgcggttccagatcgagctggaaagccgccttgctgccggtgagaccctgaccgagctgacggtggatgaaattctgcacaagtaccgcagtgcggacgataaattccttgtggaaagctttggcaccattgcggcctacggcggcaacgcagccatgatgcactaccacgccaccccggaagatcacgctgtgctggaaaagaagggctttctgctggtggacagcggtgccacctacatggacggcaccaccgacatcacccgcacctacccgcttggcccgctgaccgaggacgaaaagcgcttctacacatggactctgcagagccacatcgaccttgccaaggccgtctggctggattactgcgagtgtaagatgatcgacaccattgcccgggaaccgctgtggcggcaccttatcaactaccgctgcggcaccggtcacagcgtcagctttgtgggcaacgtgcacgaaggcccccacagcctgcgcggcaccaactccgtgcttatgcgcccgggtatggtgatcaccgacgagccgggcgtttacgagaccgacctcgtgggcatccgcatcgagaacgagctggtgtgcgtgcacaaggccgataaccagtacggtaccttccttggttttgaaccgctgatgttcgtgcccattgccacctctcccatcctgcccggtgtgctggataaggacgagatcgcatggctgaacgattaccaccgtcaggtgtttgcaaagctggcaccgcacctgaacgacgaagagcgcagctggctggcggagaagtgtgccgccatcggctgctgagaaagcgcaaaaaacacccggagccgtgcaggagccagagcggctctcggcggcagccgggtgctttttatagggtcacagcttgcagcagtgcgtctgtggggtgtccagcggcggaagagtgaactcgttttcgccaaagggcgaacgcaggatggccgcccgcgtttccgggtagatgccaagttcggtgtagatgtcccggtacaggagcatcacccgccgccgcagcgaaaggatgtcggcggtggtcactctggagtgggagacgctctggctgttctgcaggtagtaatagccgatgtccgggatggaaacggcggtgcgcacatagcgcagatattcggtgttgaacagctgatcctccgcaaacaattctttgcggaaatggaggctgtgcttccgcaggaggtcacggcagtagagcttgttgcaggggctgccatagtagaaggtgttcggcttctggatcaaatgctttgcgtactcctgtccggtgtacaccccggcaggcagatagccataggcccgggtgcggggcggattgcgctggagcacatgctgcagcgccttttcccatgggcggatgtgctccacatagttttccgggtacaccatccagaagggcgcgatcacaagatcggcggtgtgggcctcggcggcggagaccagcttttccgtaaaatcgggggccagccagtcgtcgctgtccacaaactggatgtatttgccgtgggccagcgcaatgccctgattgcgggtatccgctgcgccggtgttggttttatccaccagtgcaatgcggtggtcgctggcggcaagggcgcggcagacggcaagggtgtcgtcggtggagccatcgttcagcagcaggatctcaatgcttttataagtctgagcgcagatgcttttgacacagcgggcaatgcacccggcagtgttgtacatgggcacgatgatgcttacaaggggaaattccataggttctccttttctcagatgcggctgtgggtgcgggcaaatgcgtcggaaagcttctgcaccgggccgttgggcagagggctttcaaacaggctcagatagatgccgtgcagccgcaggcggaatttatcgtacacgcccagctggatgcacagttccttgtaggtgtggtacatccggctgcggtggcgcagcatgtccgccgcgctcacctgcgtatggcatacgctctgcgggttctggatgtagcagtaggcggcttcgtcgatggcggcaaaccgctgtgccacctgcagataccgggtgttgaacagctggtcctcggcgtataccacatgctcgaaccggatgtgcgccatctggatgagatcccggcggtagagcttgttccagagcacgccgtagtaaaaggcagcggcattgccggtgagctgccacaggtaatccaccttgttgtacaccccggcgggcagcaggctgtactcccgggtgtcatagccgccatccttgcggggcaccatcatccggtagggagccagcacaaggtcggcatggctgcgctgcatagcagccaccaggtttgcggtgcagcccggcagcaggtgatcgtcgctgtccgcaaactggatgtattcgccgtgggcaagggcaaggccgcagctgcgggtgtctgctgcgccggtgttgggcttgtccaccacacggatgcggctgtcggcggcagcaagcttccggcagacagcaagggtgtcgtcggtggagccgtcgttcagcagaaggatctcaagctccgggtagctctgggatgtgatgctctccacacagcgggagatgaagcccgccgcgttataggcgggcacaataacgctgacaagcggctgcggcatggcgggtccctccgttttttcttttttcgatgcagcaaagttttatttatcatactccagccctgcgcaaaaatcaaggcgggcggctggcggaaaggagaatgtgagatggtatttcacattgcggtatgcagcccggacgcggccttgcgcagcgggctggaacgccagtgcatggaatattttgcccggcggcaggatgcgtgcatcgtgcagcagctgccggatgcagatgcgctgctgcgccgggacaccgagggagaacggtttgacctgtatctcatcgaactgggcgctgtagcggccccggcagggctttcggcggctgcggagctgcgccgccggggccgcagggctccgctggcctttgcggcccgcacaccggcccacgcctacagcgctttccgggtggatgccatgcagtatctgcttctgccggtgcaccagcaggagctttcggccctgcttgcccgcgccaccgagccggagtacggcccggcaatgaccgttgccaccgccgaaggcctgcgggcgctggcctatgcgcagatcgaatatctggagtgcacccaccatgtggtgcacttccatctgctcagcggcgaggatgtggtgtccctttcgctgcgggtgtcctttgccgaggtagcaaagccgctgctggaagacgggcgttttttgcagccgcaccgctcctatgtggtcaatctggcggcggcacagctgctgacggcgggcgagctgcagatgtgcagcggtgcgcgcatccccatcccgcgcggacgggagggtgcagtgcgcgaagccttccgcagctggatcgaccggtaaaatggtaaacaaaaaagagccgctttcacggctcttttttcgtgcccggagatcaggcatcgggttcggttttgtgtttcttttccttgtcggaagcatccagaacaccaaagccccagcggttggccatgtccatgatgatcttctggggagaaccggagggataggcgttctcggagaacgcggtcaggaatttatacagctgcggctgcacctgatcgtacaggcccagctttgtgtacagctccttgtaatagcggaacacctgcagtttgttctgcacgatggaagccagattgatctgggtgtggcagatgctctgggggttctgcacatagtggtagcccgctttggaaatggatacgaaaacattggcgtacaaaatgtattccagattgaaaaccaggtcttcggcccagcgcacctcgctggtgaactgaagatgatggtctgccagaatatcctggcggtagagcttgttccacagcacgctgtagaagaaggatgcgggcttctccatcaggcgcagggcaaaggtatcgcggtcgtagatgccctcgggcaggaagccgtattcacggatatcatcaggctttttctcggcatcgatgccaaggttctcctgcaggttttccagtgcctgcgtggccttggaagagttggcgggaatcaccatccagtaaggtgcaatgaccagatcggcgttgttcgcttcggcggcagtcaccagccgctcggtaaaatcagggtcgagataatcgtcgctgtccacaaactgcacatacttgccccttgcaagggacatgccgcagttgcgggtctccgacacgccggaattggatttgtccaccagaacgatgcgggggtccttttcacggaattgctcacagatggaaaagctttcgtcccgggacccgtcgttgaccagaatgacctcgatattcttccatgtctgggcacaaatgctctccagacagcgggcaacactattctgcacgttgtacacaggcacgataatgctgacgagtgggttgttcatgacggaaggtctcctctttacggatattatacctttatattaaaaatcacagagtgtattctcacaaatgaggacacttcccccttggggcagtcctatttataatatcatactcttcttgcgcacaaaatgcaagagcaaagaaggatcagataaagaaaagaaccgcacgctgcggcccttttttcttacacacgtgtccagtccagcgcatcccaccggggcacgaactggctgcagatgcggcgcatctccggctcgtcggcggcagaggtgcggtctgcaatgccaatgacgtaatacccggccttgtgggcggtggcggcggcgtatacggcatcctcgcacacggcgcaggcggcgggatctgcaccgcccagacggctcatgcactcaaagaacacctccgggcggcttttgtgcagcacgccctgcgcttccacgatgaaggagaaatactgcgcgatgcccagccgggtaagcacggtgcggcactgttcggcccaggtgttggagcagatgcacatgcgtgcgccctcggcctgcagctttgccagcatcgtgcgcacgccgggtttcagctccacggtctcgtacaattcggcgatcacctcgcgcatcacggaaaaatagctttcctcggtcagcggcaggccgtactcccggatcagatactgtgcgccctcctgcattcccatgttcagcagtgtggcgcgcagatccccccgcggggtgcggccatagcggcgcagcagtgcgtcgggggcaccctcccacaccacggtcatgctgtcggtcagggtgccgtccatatcaaagatccattgcttgcagtgcatgagaatgcctccttttgagatcctgacaagtataccatgtttctttgccgggagaaaggcatcaatttacaaaaaacggaagaaatttctctggaaatatgctataatctgaacaaaaccggaaacgatcaaaggaggcggatgcaatggatgatcgcagtgctccgtgcaaagctctggtgctggcgggcggcggagccaggggcagctatcaggtgggtgtgtggcgcgcgctgatggagctggactggcacccgcagatcattaccggcaccagcgttggcagcctgaacggtgccatgttcgtgctgaaccagtacgagacggcccgcgatatgtggctggccatccgcagcaaggatgtgatggagctgccggaggaggatgccgacctttcggccctgcaccagttcctgcgcagcgtggtgaaagccggcggcatggatgtgaccccgctggaagagatcgtggagcgggtgctggacgaggatgccctgcgcgcggctcccatccgcttcggccttgtcacggtggagcagcggggcttaaagccccgggagctgacgctggacgagatcccggcaggaaaggtcaaggactacctgatggcctccgctgcctgcttcccggcgctgcgtgcgcgggagatcgacggggtcaagtttctggatggcggctacagcgacaacatgcccaccggtcttgccaaacgcatgggcgcggatgaactggtgtgcgtcgatctggaaggcgtgggcatcacccgccccaacctcaccggcctgcccaccgtgatggtgcgcagctactgggagctgggcgatatcctgcactttgaccccgacaccgcccgccgcaacatcgagctgggctactatgatacccgccgcgctatgggatatctgcgggggtgtgcctatgctgtctcctgtgatgcccagagctgcgcggacgctgctgcgttccacgcaaaatttgagcgggtgcaaaaggccgtgcgggagaaatacccggtcaccctgacggcggatgcggccctgctgctggccaagatgaaggatgccgaccttgccccgctggaagccgccgcggaagatgccggtgtggacccggcccattactacaccacccatactttgtgcgatgcattccttgcaaagtgcgatcaggcacggatgcagagctttgcaccgctgtttgagggcagtgccgatgcggcgcgggccgcactggccgcgctgctgcccaatacctttttgcaggcgctggtctggcgcaccctgaccacgccggaagccgagcttttgccggaggtgaccgaacatgaaagtgtataaaggttcctgcgcttctcccggccttgtgctggggcaggtgagccgtctggagcaccatgtggagaccacgaccgtgggcccctttaaaccgtcccgggagctgcagctgctcaccgatgccatccgcaccgcacaggacgagctggaatccatggcagaccgtgccgcacccagcgagcaggccatcttccagttccagagcatgatgctggacgacgagggcatgatgaacgaggtgcgcttctgcatcaatgcaggcattggcgcggcagcggccatgaatcaggtgggccagcgctacgccgaccagctggccaacatgaaggacaacccttacatgcagctgcgcagtgtggatattctcgacgcaagccgccgggtcatcaacatcatcaccaaccgcccccgcatgtggctggcgctggatcacccggtgatccttgccgcagagcggctgatgcccaccgacctgttcagcgtgccctccggcatgattttaggcatcatcacggcagagggcagcggccagagccatgccgccatcattgcccgggcaatgaatatcccgggcatcgtgcaggtgggccgggattttctggacgactgcgacggccgcaccgtgattttggatgccaccgggggccagtgcacgctggacccggacgctgccgcccgccagcaggccgagacccgcatctgcgagctgcagcgggagaacgaagagatggggcagctgcatgctctgcccaacaggacaaaggacggccagccctttgagctgctggccaactgctttgggccggaggacatcgacacggccatgcagtccggtgcacagggcgtgggcctgctgcgcaccggctacatgatgctgccgggccgcatcctcgatgagcaggaacagtatttcttctactgctcctgtcttgccgccgccaagggctgcccggtaacggtgcgcaccttcgactttggctcagaccgcaccatttccgacgcctatcagggcctgcagtcttccaagcttggcctgcggggcatccgcaacagtctgcgccagccccaccagttcgagacgcagctctgtgcgctgctgcgcgccgccgcccgcggcccactgcgggtgatgttccccatggtgacgaatgtggaggactgggacgcagccatgcgtgtggtggagcgctgccgcgaacacttgcgggaacgcggcgtggcgttcaacgaagatacaaagttcggcgtgatgctcagcgtacccgctgcctgcctgaccgctgaggaatttgtagagcacggggtcgattttcttgtggtcggcaccaacgacctgacccagtatacccacgcggcagaccgggagcttgctagcgccgagcactactaccgtccggccagcaaggccatgaaaaagctcatcaccatggtgatggatgccgcaaaggttcgcaatgtgccggtgaccatctgcggccttgcggtgggcaaccaagccaacacggtgcagtatttgcagctgggcctgcgcagcttctcggtgagtccgcagaaccttttgaatgtgaagaaagctctgctggaagcagagacataaaccctgaaaataacaaaaaagcagctgcaacgcagctgcttttttgttattccagattccccgtcagggtcattaccgaagcaagcacggccagcggggcggtctcgcaccgcaggatgcgggggccaaggcccaccgttctggcaccggcctttgcggccatctcggcttcctcggcggcaaagccgccctcggctccggtcacgatggcgattttcagcttttcaccatcggcgggctttgctgcggccagcaggtcgcgcaggggcgcgccgccgcactcgtagcagaacagcacaaggtcgtactgtgcaaaggtgcggcacacggcaccaaagtttgccagcggcagggccacatccggcagaacgccccggccgcactgcttggcggcttccaccgcaatgcggttgtagcgctcgttcttctgctcctcttttttgggggccgccacgcagtaccggctgaagaagggcacgatgtgggctgcgcccagctccacgccgtgcttgatgatctgctccagcttgtcctgcttggggtagccggccagcagagtgacctccacgctgggttcggcggcgctgggatagcccggctccacccggaactccacacactcatcgccaaagccggtgatggtggcggtgtattccacggcattgccgtcgcatagaatgacagtatcgcccagccttgcgcgcatcacgcgggcaagatggtgggcatcggccccgcgcagggtggcggtgccgtcagagatctcggtggtaaaataacggtgcggcatagtggttctccttaaacgtcctcgccctctcagtctttgcttcgcaaatccagctcccccaaagtgggagcccttggcagtccacgcaaacttcatctctttgccaaggcctctccctttgggagaggtggcaccgaaggtgacggagagggcaagccagctgaaagaaatcatgaaagcttctgtaattacgctttcttgcagacgatgcactcccagccgcgcttctccttcacttccacaacggcaaggccggctttttccagcccggcgatcacttcgtccttgcggctgtcgatgatgccgctggcaataaaggtggcaccctccgccatcaggcccggcacggcaggagccagagacaggatggcgttggccacgatgttggcggtgatgatgtcgtatttgccgctggccttatcggaaaggtcgcccaccagcacggtcagcttgtcctgcacaccgttcaacgcggcgttctcgcctgcggtgcgcaccgccacagggtcgatgtccacgccctcggccacggcagcgcccagcttcagcgccgcaatggcaaggatgccgctgccggtgccgatgtccagcacccgctcgccgccggtcacccgctcgtccagcgcttccatgcacaggctggtggtctcgtggccgccggtgccgaaggcaaggcccgggtcaaggatcagctttacccggtcagtgtcgtactgctgccacgagggcaccaccgccagccgtttgccgatctccaggggatggtaatacttgcgccagccgttctgccagtcctcctgctccacgccctcggtctccacggtgtaggcgatgtttgcagcttccatgcgggcagcaatgagggccagcgtttccacgggggaagcgcccggctccagatacatatggatgataacggtatcgcggggcttgtccagcagctcctgctcgatcagatccacatgggcgatctcggccacctgctgctcgatgtcgctgtagtcttcgatatagatgccgccctcggcgatcatggtggcaacggcttcggcgttgtcagcgtcggccttggccacggtcaggcggatatcagtccattccataatgctgtctccttttattttgcatcctcgccctctccgtcattgcttgcgcaatgccacctcccccaaagtgggaggccttggcagtccatgcaaagtttgcggttttgccaagggctctccctttgggagagctggacgcgaagcggcctgagagggcgcatgttctttataatagtatagtacccgattcggctgtgggatgcaagcctttgggcaaaatgtacgtaaaaagaaaagaattttcaacacaaagacgacccttgtgcggaaaatccaaaaattatcgactgaaaaacggccaaatgaggacttttgatgcattttgatagaaaaaaggcgaaagggactttctttttttgcggaaatatgttactattctattacggaattatggacggcctgcaaccagaggcgtctgtaaacacaaacatttcttaaggaggaatgtgctttatgatgaagtatctccagaaactgggcaaagctctgatgcttcccgtcgctgtgctgccgatctgcggcatcctgatgggtcttggttatgcccttgctccgggcgttatgggcgttcccggtgcagcaacctccggtgcagcttacaccgttggcttcctgctggtcaaggcaggcggcgctctgatcgataacatggcatggctgtttgccattggtgccgctgtcggccttgcagacaacgacggcaccgcaggtctggccggtctggtcagcttcctgatgatgcagcagctgctgaaccccggtgtggtcggcatggtccgtcacctggaagaaggcactgctacctacatcgccttccagaaggtcgccggcaactccttcatcggcattctggccgctgttgtgggcgctgcctgctacaacaagttcaaggatatccagctgcctgactggctggcattcttctccggcaagcgcttcgttgcaatcgctaccggtctgatctccattctggtgtccgttgttctgctgttcgtctggcccgtcatcttcgacgctctggtcgcaatcggcaacggcatcgctggcatggacggcatcggcgccggcatctacgccttcctgaaccgtctgctcatccccaccggcctgcaccacgctctgaacaacgtgttctggttcgacaccatcggtctgggtgacctgagccacttctgggctggcgagacctctgctgatgtgggctggagccttggtatgtacatgtccggcttcttcccctgcatgatgttcggtgtcctgggcgctgctctggctatggtcaagaccgctaagaacaagaaggctgccatcggcctggttctgtccgctgcaatctgcgccttcgtctgcggcgttaccgagcccttcgagttcggcttcatgttcctgtgcttccccctgtacgttgtgtacgctgctctgtacggcatcttcaccatcatcacctactactccggtttccgtgccggcttctgcttctctgcaggtgctaccgacctggtgttctctgcttccctgcccgcagctgccaagacctggatgatcattcctctgggcatcgcagccttcgtggtgttctacgcagtgttctactttgccatcaccaagttcgacctgaagacccccggccgtgaggacgaggacgaagaggccgagaagaaggtcgttctggcaaacaacaactataccgaagtcgcttccgctgttctggctgctgtcggcggcaaggagaacgtgaaggaagttggttactgcgcaacccgtctgcgctttgaggtcaaggataacgccaaggtggacgagaaggctgtcaaggccgctggtgctgccggtgtcatccgccccagcaagaacgcttgccaggtgatcatcggcaccaaggttcagttcgtgtacgacgagctgaagaagatgctgtaacgcacacagcattctgaacggagtttgtgcgggagactggttgctcctgcattcccataaaagccgccgggagaagggcagagcctgccgctcccggcggctttttgcgttcccgcgcggagtgtgctatactggttcaaaaggcagatacgggaggaaaaaccatgagcaaagtgtacagctggcggaaactgaatgaaaaagaactgacgcgggtctatctggacgaaatgcggcgggactttccgcccacggagctaaagcccctgagcatgatcctgaacagcgaagcggacggcaccgcccacacatggggcgtgttcgacggcgaaacactggcggcgtacctgctcatggtgcgcccggcaggcagcagggtgagccagctggattactttgccgtgctgccggaataccgttctgcagggctgggcgcgcagctgctggccgacctgccgcagcacgagcgcggtgcgcaggccatcctcattgaggccgaatgcccggataaggcggaggacgaagctatggctgcgcggcggctgggcttttatgcccggtgcggcgcgcgggacaccggcttcaccgagcacctgtttgatgcatggttccgcattctggtgctggactgcccgggtgccggtacctttgcggaccggcaggccgtggatgccctggtggactgctaccgccgcaccatcagcgagaccgagtggcagaagtacgtgcagttctactgcccggacggaacaaaatactgctgagcagaaggcgctctgtgcaaattatgtgtacagagcgcctttttgtcatatttttgttgacagactccccaaaagtggtacgctaaaagcacagcaaaacgcttttagaggagggcaatattatggcagaaaaaatgacccggcgtacctttatgaagagcgcagcagctgcggctgcagcaatctctttgtccggcgtgctggtcggctgcggcggtggaagtactgcggccgatgaggtgaagctgggcgcatatacggtgaaactgtacagtgcgaatacacatgcagaagtacagggcaccggcggctcttcgtataagatcacggcaaaggcagatattacatttgataagaatgcgggaggcacgttccaggaactgccctgtaaaggaatgtttacgggtaagatcggcgcggtttctctgaatacaaccaaaccgaccggcagccttacgatgtcgaatttcgcaggtctgaactggttcatgagcaaggcaacagtcgaggttgaaatgacgatcccgacagagaaagcctatgagaagatcgccgccggaaccccggtggagataacggtcaagctcaacaatgtagagggaaagctgtatatcgtacaaaaggatcaaacattccttgtgctgaatacagacccgacgcccgcagggtgattttaaacgcagatcacgttagacagcaatcaaaaaagaaggcgctccatagagagcgccttctttttttgtcactttgcccagccagaaaatggtattttcggcatatttatcctgtttgtaaaatttgagcgcaggcttttcatgccggctttacgcaggcttgacacagccgccggagcctgtgcaaaagctttacctccattttgcgcgtacatggtcgcagcgcgcacggcggtgcggtacaattaggccgttcccaaggaaaacacaagaaaacatcggccggaacggcgttccggcatttattggaggaaaagggttatgaaaaagatcactcgtcgttcgtttatcactgtctgcggcgctgctgctgcggctatggctctgaccgcctgcggcggcgcagcctcttccactgtggcatcctctgctgcggagtccacctcttcttctgccgctgctgagaccgctgcaggcaccctgtccggcaatgtggctaccggcggttctacctctatgaagaacgtcatcgcagccctgaccgagggctttgccgaggtggagccgggtgtcaccgtcagctacgaccccaccggttccggcgcaggcatcaccggtgctaccgataagacgctggacatcggcctgtcctcccgcgccctgaaggacgacgagaagaaggatgcggacggcaccaccgtggctctggacggcatcgccatcgttgtcaacaaggccagcaaggtggcagacctgaccgtggaccagctgaagcagatgttcaccggcgagatcaccaactggaaggatgtgggcggcgacgacggcgagatcgttctggtgggccgcgaggccggttccggcacccgcgatggctttgagagcatcgtggatgtgaaggacagctgcaagtacgcacaggagctgaccgctaccggcgcagtcatcagcgctgtggaggccaatcctctggccg

SEQ ID NO: 1166 - DNA, 26049 bp, unidentified
  source 1..26049: mol_type = unassigned DNA
cgattatgacgcactgaacggtgagactgtcagctgcgctgccacccccgctccccactgcgagatcctggaggtctgcaagcagattctggccgacaagggcattacgctggacatccaggagtacgatgactatgtgatccccaacaccatcgttgaggatggccagtgcgataccaactacttccagcatcagccctacctggacaacttcaatgaggagaagggcacccacctggtctccgttgccggcatccacgttgagcccatgggcatctacggcggcaagcagagtgacctgagcccgatcgagggttaagcgaactccagtcaccttgcggtgacagccccctcggggagggggcctttgcctgaccgttctgtttcaggctccctctatgagggagctggcaaatccgtaaggatttgactgaaggagcttattcaacagcaaggagcaatttttgtgatcgagatcaaacacctttccaagaccttccagatgaaggacggcgcagtgaatgcgctgaaggacatcagcctgaccatcccggatggttcaatttacggcatcatcggtatgtccggcgcgggcaaatccacgctggtgcgctgcatcaacctgctggagcgccccaccgagggcagcgtggtcattgacggcgtggagatggaaaagctcacgcccgcccagctgcgccagcgccgccgggagatcacgatgatcttccagcagttcaacctgctgatgcagcgcagctgcctgaagaacatctgcttccccatggagctggcaggtgtgaagaaagaggaagccgaaaagcgcgccaaggaactgctggaaatggtgggcctgcccgataaggccaacgcctacccggcccagctctccggcggccagaagcagcgcattgccattgcccgcgcactggcaactgaccccaaggtcctgctctgcgatgaggccaccagcgcgctggaccccaacaccacccactccatcctgaccctgatcaaggacatcaaccggaagctgggcatcacggtggtggtcatcacccatcagatgagcgttgtggaggagatctgcgatcacgttgccattctggacggcggcgttgtggtggaacagggcgaggtgaaggagatcttcgccaaccccaagaccgccgcggcaaagcgtctggtggctcccaacggcggcagcgcagcccgtgacctatccagctttgcgccggacgatcatgtggtgcgtgtgaccttcaacggttcttccgccgcaaaaccgctggtggcaagccttgccgccgaaaagggtattctggtgtcggtgctcagcgccgatacccgcgacctgagcggccagtgctacggctccatgctgctcaagctgcccgctgacctggatgaagcaaaacaggctgctgcctacatgcgggcgcagcccggcattacggtggaggaggtgaccggagaatgaccattgcagattatggctttgccatctgggagaccttctatgtgacgttgctctccaccgcgttctctctggtcatcggcctgccgctgggtgtgctgctggtggccggtgataaggacggcattctgcccctgcccggctggctgatgcacctgctgaatatcatcatcaacatcctgcgcagtgtgcctttcctgatcttgatgatctgcgtttttccgctgacccgtatcatcgtgggcaccaccgtaggcaccaaggccaccatcgttccgctggtggttgcggccttcccgtttgtggcgcgtctggtggagaccagcctgcgcgagctggatgagggcgtggtggaagccgcccagagcatgggtgcgaccccgttccagatcatcaccaaggtaatgatccccgagtgcctgcccggcctgatctccagcatgaccacggccctgaccaccattctgggctactcggccatgtccggtgtcatcggcggcggcggcctgggcaagatcgccctttcctacggctactaccgctaccagaccaacattatgatcgtctgtgtcatcctgctggtgctgctggtgcagatcttccagaccgttggcaccttctgggccaccagaagcgataagcggctgaggaagtaactccttcagtcgcacttcgtgcgccagctccctcggagagggagccttaaagcctccctctttgagggaggtggcaaagccgaaaggctttgacggaaggagttctctcctcatttcgtcccggacgggaagtaaaattcaacgtttcaattccccgccggaggcatgtgctcctgcggggaattgtgctattcggacaaacccagtaaaggagtatgttgcaatgaaccgtgataccatctgtgtgcagggcggttatacgcccggcaatggcgagccccgccagatccccatcatccagtccaccaccttcaaatatgccaccagcgaggatatgggcaagctgttcgacctggaagccgacggctacttctactcccgcctgcagaaccccacctgtgaccttgtggccaagaagatctgcgagctggagggcggcaccgccgccatgctgacctccagcggtcaggcagccaacttctttgccctgttcaacctctgcgaggctggtgaccatatcgtggcatccagcaccatctacggcggcaccttcaacctcatctctgtcaccatgaagaagatgggcattgaggccacctttgtggacccgctgtgcaccgaggaggagttgaacgctgccttccggcccaacaccaaggtggtgttcggcgagaccattgccaaccccgccctgaccgtgctggatatcgagaagtttgccaaggctgctcacgcccacggcgtgcccctgatcgtggataacaccttccccacgccggtcaactgccgcccctttgagtggggtgcggatatcgtgacccactccaccaccaagtacatggacggccacggcgcggtgctgggcggtgccatcgtggacggcggcaagttcgactggatggcccacgccgagaagttccccggcctgtgcaccccggacgacagctaccacggcatcacctacgccgagcgtttcggcaaagagggtgcctttatcaccaaggctaccgcgcagttgatgcgtgactttggctccatgcagtcgcccatgaacgcctacatgctgaacctcggtctggaaagcctgcatgtgcggatgcagcgccactgcgccaacggcatggctgtggcagagttccttgaaagccatcccaaggtggcctacgtgaactactgcggcttggagtccagcccgtaccatgcactggctgaaaaatacttgccgaacggcagctgcggcgtggtcagctttggtctggccggcggccgtgaggctgcaagcatctttatgaagaacctgaagctggcagccatcgagacccatgtggccgatgcccgcacctgctgcctgaaccctgcatccagtacccaccgccagatgaacgatgagcagctgaaagccgccggtgtgcccgcagagctggtgcgcatgagctgcggtctggaaagcgctgaggatctgatcgcagatatcgcacaggctttggataaaatttaacggtctcgccctctcagtcacctgcggtgacagctctcccaaggggagagccaattgcggcccatggtcagcagatgctgaacctgggagatgcgctgcctccccctttgggggaggtggcattgcagagcaatgacggagagggcaatccatctaaaggagtaaccatctatgcccctcatcatcccgaaaacgctccccgcctacgatgcactgtacgaggaaaacgtctttgttatgcaccgggagcgggcagcgtcccagcatatccgcccgctggagatcctgatcctgaacctgatgcccaccaagatcgccaccgagacccagatcgcccggctgctggccaacacgccgctgcaggtgcacatgaccctgctgcagacggtgagccatgaggcaacgcacgtctcagcggcccatctggaggccttttataagaccttcgacgaggtgaagcataaccgctacgacggcatgatcatcaccggcgctccggtggagaccatggactttgagcaggtggattactggccggagctgtgcgagatcatggatttcagcgaaacgaacgtctattccaccctgcatgtctgctggggtgcgcaggcgggcctgtactaccactacggcatccgcaaggagctgctgcctgccaagatgttcggcgtgttcgagcaccgggtcatccgaccctccaacccgctggtgcgcggctttgatgaggtgttctatgccccccacagccgccacaccgccatgagccgggaggatatcgaccactgcagtgcgctgcgcatccttgccgagagcgatgaggcagggcctttcctgatgagcaccgagaacggccgtcagatctttgtcatcggccacccggagtacgataaatacacgctggatgcggagtataagcgggatgttgccaaggggctgcccattgcagtgcccaaaaactactaccccaacgatgaccccagccagccgccgctcttccgctggcgcgcgcacgcccatctgctgtatgaaaactggctgaactattatgtctaccagaacaccccctatgatctgggagagatgcagcgcgtgaagcactctgaggggtgaacccgctcagccgcctgcggcagctcccccatggggatgccaggtttacgcacgactgtttttctgcctctcctatcaggaggggcagtattggaaagcaataacggagaggtatttatgggaatcgataagaatgaatggggcttccgggtgggacatctgccccacggggagcgcaataagatcagtgatgtgccgggcgtgacagtgggccattgcacactggcggatggcgacatccagaccggtgtgaccgcgctgctgcctcaccccggagatgtgttccatgacaaggtgctggcggcctgccatgtcatcaacggcttcggcaagaccacgggccttgtccagatcgatgagctgggcacactggagacccccatcctgtttaccaacaccctgagtgtgggcaccgtggagacggcgctggtcaaatatatgctggagcgcaaccccgatatctgcgagaccaccggcagtgtgaacccggtcgtctgcgagtgcaacgactgcggcctgaacgatatccggggcctgcatgtcaccgaggcgcatgtggctgccgctctggcagactgcaaagccgatttcgccgagggtgcagtgggtgccggacgcggaatgcgctgccacgggctgaaaggcggcattggttctgcctcccggctggtggagctggacggtaagtcctacaccatcggggcaatggtgctctccaatcacgccaccttcgatgacctcatcgtggcgggcacgcccatccacgagctgttggaagcccgcatcccgccccatgaggacaagggctccatcatcacggtgctggcaacagatatccccctgagcgagcgccagctgcggcggctctgccaccgggcgctggtggggctttcccgcaccggcagtgcctgcggcaacggttcgggtgagatcgttctggcctttaccacggccaaccggatgccgcattactcggacaaagccctcctgcccatggagatgctccacgatgatgccatcaacccgctgttccgggcggtagctgagtgtgtggaagaaagcgtcctgagcagcctgctccacgccgagaccgtcaccggctaccatggccggacggtgcagtgcctttccgacctgttgaaaaaataatgtaaataacaagcctttccgtgtggtgcacctcacagtgtgacaccagcggaaaggcttgtttttttatcgctatctttatctctgcaccagcgtgatgaatgctttcatctggggggtgagccatttatccttgtggtaaaacagctgccgccgcatctccacgcggcaggcggggacattcaggcgggccagcgttccggcggcgagggcattctgtacgatgtactcgggcaggaaggaaagccccatgccgtgttcgaccatctggcagagcagggaagcgctgcccagctcgaggaagggcttgatggccagcccatgcgctgccatgcactggtcgagggcatcacggtagctcatgcctcgctcggtcagcaggaactcctgcccggccagttcctgaagcgtgacctctgcctgcccggccaatgggtgcccagcgggggccaccacgcagattggttccggttcatccacagccagcacgaagctgggctgcagcagcggcttgtccagcgtgtatgccatgtcaatctgattggagcccagcatctggagcatctcatcgtcggtggcggtgcggagtaccagctccacctgcgggcagagggcgtgataccgctgcagcaggtcgggcagaaaagtgctgcagaccgaatctgccagtgccacccgcagggtaccgctgacctgccgggcaggctgcagggccgccttggcctgctcggcagtggccagcagggagcgggcataggtcagaaaggtctgcccggcatcggtcaggcggaccgttttgcccacccggtcgaagagcggcgtttccaattcggcttccagctgggccacctgcgcggagactgccgactgggaataccccagctcccgtgccgcacgggaaaagctgtgcagctccgcaatatgcaaaaaggtgttgatggtacgcagttccacggcggcacctctcagcggcgggtgatgccggtcacggtcagaacagcaccatctacgacaaaatggacttccaatcccgaaaattccattccgtatacccgctccgggtcgtgctggtaggaggggcgggggtcgttttccagcacaccctgcaggccgtcccgctcggcggcgggtacggtctcccacagctccggcgggcatttgacctgcagcctgtgcgtctgggtctgggccgtgaatccggctgccgcgtccgggtgacagtcggcgtaggggatgtagggtttgatgtcgtagatgggggtgccgtccatcaggtctgcgccccgcacgatgagcaccgggcccacctccgggcggtgctcgatggcctccagcctgacgctggaaaggcccagcggattgggccggaagggggagcgggtggcaaacacgcccatccgggtgttgccgcccaggcgcgggggccggacggtgggagaccagctctcccgcaccgcgccggagaattgccacaccagccagatgtgactgaaatcctccagtccgcgcagggcatcggcgttgcggtattccggggtgaagataatctcgccccgcaggccgtccaccagcccgctctgtcgggggatgccgaacttggtggggaaggcggtgtggatgtgtgcgatgaccttcagggtcatggtttcgttgctcatattataaacctctgcagaagcccacggctctgccctcgatctggatctcgttcaactgtggcccggcatagatcatgggcgggcagacggcggcgttgtcggccagaagcataacggtgtcgccctgccggtgaaaatgctttaaggtggcctcatcgccgatccgcacggcggcgatctcgccctgctccacctcaggctggcagcggatgcagacgatgtcgccatcgcagatggtgggggccatgctgctgccgtggcaggtcagggcaaagtcggcatgccatgcggcaggaacgccgatgtagcattcgatgttctgttcggcggtgatgggggagccgcaggcaatactgcccaccagcggcacccgcaccatttcgggcaggggctcaaaccccggcgggacaaacgcagtgttttccagccccatcagccatgcgggggtggtctccaatgcagcggcaaactcctccaccttggactgcgggatgtcgttgacccctttttccagcttggtgatggaggatttggagcggtagcccatccgctgggcaagctcttcctgagagagccccagctcgagccgacgctgtaagatacggcgggaaagttctgacatggcagagacctcgcttttcctgaaaaagaatgttctgccgtgagtatatcagaaaagttcttaaaaatcaacgattttcgcgcgattttggtaaaatagttgacaaaaaatcaacatcgaactataatacaaccaaagattgtgaaacgacacgcagagatccagatgaaaggagaacctttgatgacaaataccacacagatccgcgcctacattgaaagccagggcctcaagctgggccatgtggcacgggtgctgggcatcagcagcagcgccctgcatcagaagctgaacgacgagagcgatttcaaagtcagcgaagccgaccgtctttctgccatgctggggctgaccatggagcagcgggatgcctgcttctttggcccgggcacccggatgtgccaaagaaagggggcagcgtgatgaccgctgaacagcgcagaaagacccgggaggccctgcagaactacggtacccgccagtgggcacgcagcccggccaattggggctgggcccgggccatccagcagacgcaggagtattaccgcaccgccgaccccatccgtgcaggcctgctccagctgcgctacctggagcgccgcaaggaggaggacgtgctggagcggctctgcatcgggcgcaccacctaccagaaagcccagctcgatctgctgagcaccgtagccgtttttgccgcccgctacggtgccctgtgacgcaaaatgcccccggacagccatccgggggcattgcagtcagtgcgttttcttttccggagtatcgcagtgctggtggcaggaggcgcagttgccgccgcagccttcgcctttccagccgccctgcttggagatccagaccactgccagggcaaacagccctgccagcaccagaatggtaatgatcccacggagtgtcagcattgaaaaaacctctctttttgcgctggaatgcgcaatttcagtatacaccattttgcgcaaaagagcaactgccccgcagtgggaaaaaattgcgaaaaaatcaaaattagggcttgccaatccacttcggttgtggtataattctcttgttccgattcggaggattagctcagctggttagagcacctgcatcacacgcagggggtctggggttcgagtccctaattctccaccatacagttcgtactcgaacccgattctttacgaaaaagggttcgggtacttttttgtttcacaagatgttctctatgccgagagtatgcagaacggtaaacaggaacgaacaaaggcaggataccaccatcacggtgacaccctgccttttgtgttacaaggatattctgggggcgattgctgcgcacaaagcgccttaagcccctgcgtttgcttcggtcagcacaaaggttagctccgctgtggcggcgcacttgccatccacataagcagacgctttcccgatgcccaccgggccgcgctgttccaccagctcacaatggagcgtaagaacatcccctggggtgacctgtttgcggaagcgggcattcttgatgccgccgaagagggccagcttgcctttgttttcgggaacgctcagcgccgccacggctccggtctgggccagtgcttccaggatcagcacccccggcatgaccggctggcccgggaagtgaccgcagaagaattcttcattgcgggatacgcacttgcggccaatggcccactgacccggctcgtagtccaggatacggtccacgagggcaaagggatagcggtggggcagaagggctgcgatctgctcactgttcagagcggttgcgttctcccgcacggtgcgcggttctgccatggctcagccctcccatctgcgcagggcgatgcaggcattatgcccgccaaagcccaggctgttgctcagtgcgtaggtcatggcctgtgcacggcctgcattgggcacatagtccagatcgcattccgggtcaggctgctcgtagtggatggtgggcggggcaaactggtctcgcagggccagtgccgtgaacacggcctcgatgccgcccgcaccgcccagcagatggccggtcatgctcttggtgctgaccacggtcagctgctttgcgtgttcaccgaacacggcatggatggcagccgtctcgcaggcatcgttcatgtgggtgccggtgccgtgggcgttgatgtgatccacctgctccggggcaatgcctgcatcggccagtgtcagcttcatgcagtcgatggcacctgtgccgccgggagccggtgcggtaaagtggtaagcatcgcagttggcaccatagcccaccacctcggcgtagatatgcgcaccgcgtgcccgggcgtgctccagctcttccagaaccagcacaccgctgccctcgcccatcacgaagccgccgcggcgggcatcaaagggcaggctggcagcatccgggtcggtggcggtggaaagcgccttcatgctggtaaaaccgccgatgcccagcgggctgatgcagctttcggcaccgccgcagaccatggcagtctcgtaaccgtcccggatgcggtggaaggcatcgcccacagcattggtgccgccggcgcaggccgtgaccgggcaggtgcacatgcccttcaggccaaagcggatggccacctgtgccgccgccatgttggcaatggacataggcacaaagtaggggctgaccttctccatgcctttctcttccccgcgggtgtgctgctcctcgatggtgggcaggccgccaatgccgctggaaaggaccacaccgatgtttttggcctctgcttccgtgttcaggccgctatcggcaatggcctcggctgcagcagccagtgccagcagggtgaagcgggccatcttgcgggcttcctttttgtccacaacggtctcggggtcaaagtttttcacttcaccggccagcttgcacttgaaatcggtggtgtcaaactgggtgatggggccaatgccgcaccggcctgcctttgcggcagcccagctgtcggcagcagtgttgcccagcgggttcacggtgcccagaccggtgatcacgactctgcgtttttccatagagaatttctccttttacattgccatgccgccgtccacacagagcacctgcccggtgagatagctgctttgttctgcggcaaaaaacgccacagcgtttgccacgtcctccggctggcctgcgcggcctgccgggatgtcctttgccatttcggtgcggacagcctccggcagggcggcggtcatatcagtctcaataaagccgggcgcaacagcgtttactgtcacattgcggctggccagttcccgggccaggcttttggtcaggccgatgagcccggccttgctggcggcgtaattcgtctggcctgcattgccccgcagggcaacgacgctgctcagattgatgatccggccccagcgctggcgcaccatccggcgggccgcttccttgcagcagaggaacgcacccttgaggtttgcgtccagcacagcatcaaagtctgcttcggacatgcgcaggatcaggttgtcccgggtgatgcctgcattgttcacaaggatatccacccggccaaaggcgttcaccgcttcctcaaagagctttttgcagccctcggcggtggaaacatcggcctgcacggccacagcctgcgcgccctgggccctgcagagagacacggtctcagcggcggccgcttcgccgtggcagtagttgaccaccacatggcagccctgccgggcaagctgtacgcacacggcccggccgattccccggcttccgccggtcacaacggcggtacggatgatggtttcttcgttcattgttcttccttccatgcgttcagaacggtgtccagctgcgccggggtctccaccgacacacaagtcacaccgggcagagtctttttcacaaagccggagagcgcattgccggggccgacctccagaatgtgatccacacccagctcacccagacggtgcagggtgtcctccatgtagacactgctctgtacctgccggaccagcagggccgggatgctgtcgctctcggctttttcacggcccaggcagttgaacagcaccggaacgctcatttcgccaaagggttcggcggcaaagcgctttgccagggcatccccggcgggagccatcagacgggtgtggaacggtccgctcaccttgagcgggatgcaccggcgggcaccggcctgctttgcaagctctgcagccttgtccactgcggccttttcgccgccaatgaccagctggcccgggcaattgtagttgcagatctgcacacagcccagcgcggatgcctgctcacagcattctgcaagggggacccggtcgaggttcagcactgcggtcatgccgcagtcgatgccgctggccgcgtcggccatggctttgccgcggtaggctgccagctcaatggcctgcttggcggtgaatacaccggcggcttccagcgcggaatattcgcccagagagagaccggccacataagcaggcttgaccccctgctcggccagaacggcggatacgccgcaggcaaaggccaccatgcagggctgggtgtattcggtctgattcagaacgccgtccgggtcgtcgaagcagacgcggtgcagatcaaacggaaggtctgcagcgtcgaacgcggcacggaaagcggaagatgcttcgtaaaattctttgcccatgccggggtgctgggcaccctgaccggcatacaaaacagcaagcttcatcggttttgcctccattcggtcataagttcatccatcagctcacggacagtgtacatccggtccagtctgcccacattggccccgcagaagaaaagtccttcctccaggttgcccttgaccgcttcgatcagtgcatgggtgatgcagtagggcaccttggcggggtcgcaggtcttcaggcagcgggcacagtgccggggcgggaagcgtctgccctccgccatggcctgcaccagcggcgtgttcagcgcccggcccggcatcccgaccgggctgtggatgatgcgcacatcctcagaacctgcattcagcagaacgtccttgtacccctgggatgcatcgcactcgtaggtggtgataaagcgggtggcaagctgaacgcctgcggcacccagtctggtaaagtgagccagatcggccccggtgtacacgccgcccgccacaaacacggggatgctgtggccgaactgcgcctcatagggctttacctcggccagcacctccggcaggatctcgtccagcgtctggcagcttccggagaacaggtcctgctccgcaaagccgagatgcccgcctgccttgcagccctcaatgaccacaaaatcggcggtgcggccgaactccttggcccagcggcgcaggatgagctttgccgcccgcccgctggaaacgatgggcgcgatggcgacctccatcgtgttcacaaggccgggcagctccagcggcagacccgcgccggacaccacagcgtccacgcccgcttccacagcggtgcggatggcggcggcatagtcctgcgtggctaccattgcattgatggccaccataccggcaccgtttgcgatctgctttgctttccggatctcagcggtcagggcgcggtggttggcgctggccgggtcacgggcaaagtccggctcccggtagcctgcatcggcggtggagatgcaccccatgccgccgcaggccgccacggcaccggccagcccgcccagagaaacgcccacgcccatgccgccctgcaggatgggcacagacagggttttctttccgagcgtcagcattcctcgctcagcgcgtggatacgctgcctcccgccgttccacaggtcatccagaatgtccgccacagggcgcacctcgtggagcattccggccacctgaccggccatcagactgccggtggaggtgtcgccttcaaacacggcccggcgcagactgcccagggtgtacttttccagctccatcttatcggcaccggccttttcctgccggacatattcacggctcatccggtttttcagcacccggaccggggaaccgccgatgcgtccggtcacgatggtgtcgctgtccttggcattgagcagggcagccttgtagttttcgtggatggggcactcctcgctcaccagcaggcaggtgcccacctgcacgccgcaggcacccagcgccagggctgctgccagctgacggccatcggcaatgccgcccgccgcaatgacgggcagatccactgcgtccaccacctgcggcaccagcgccatggtggccatctcgcccacatggccgccgctctcggtcccttcggcgatcacggcatcgatgcccagcttctccagatgctttgccagcacagcggcagccaccacgggaatcaccttgatgcccgccgctttccacatgggaacatatttgcccgggttgcctgcgccggtggtgaccacctgcacgccttcttccacaacgatctgggcaaactcgtctgcctgcgggtgcatcagcatgatgttcacgccaaagggcttgtctgtgagctgtttgcaccggcggatattttcgcgcagggtgtcggcattcatgccgcccgcaccgataatgcccagtgcacctgcattggagcaggcggcggcaaactcaccggtggcaatgtttgccatgccgccctggatgatggggtatttcgtgcctaaaatttcatttaaaagtttcatagttttatcctatcggtaagcggcctcgccctctcagtctcgctctgctcgacagctctcccaaggggagagcccttggcagtacggtaaacttttcggttttgccaaaggctcccactttgggggagctgtcaccgaaggtgactgagagggcgagcccgtttgccgaacatgatttttactctttgtattgcaggatcgcgccgccccaggtcaggccgccgccaaagccgatgcaggccagcggtctgcccggggtcagctgcccgctctcggccagctcgttgagggcgaccggaatgctggcggcgctggtgttgccgtggcgatccatattcttataaaattttgccgggtcggcctgcagagccttgatgcagtggtcgatgatgcggctgttggcctgatggcagaccacccacgacagatcctcgagggtcagccgggtctcgtccagcaccgtgtgcaggcacttgggcagggcatccaccgcaaagcggaacaccgccttgccgtccatggtgatgggggcagagccttcccggctcggcccgcctgcatggaggacatcactgccgcgtgcccccagtgtcaacgcaaagggggtatctgccagccggaaaatggcggctccggccccatcgccgaacagcacgcaggtggagcggtcggtggggtccatcaggcgggaaagcgcttcgcacccgatgacgagggcatactgcccgcccagagtcgtcagcattccccgcgccacggccatgccatagagaaaaccggaacaggccgcattgatgtccagcgcgggccggttttcgggcaggcccagcgccgcctgtacctgacaggccacgctgggggtggcatccggggcagaaagggtcgcgcagacacagcaggcaatgtccgccggagcaaggccgctgcggtcaagggcctgccgcgcagccgcaatggccagcgtggcggcagattcgtcctcggtacaccagtgccgggtgcggatgccggtgcggctggtgatccatgcgtcactggtatccaccatgcggctcagcgcgtcattggtgatcgtccgtccgggaagtgccccgccggtggcgatcagctgtaaaccattcatgcgttcctcgtttctccgatctggcggtactttttatagcgctgatcggccagctgccggtcgctcatgcggcacaattctttcaggtgggcgcgcagagcggtatccatgcgctcaaacagggccgcgtggcagcgctgggcaccgcccaccggctccgggatcacttcttccacgatgccgccgcggtacagatcctgcgccgtcagcttcatcatctcacaggcctcgccgctgcgggaggagtccttccacaggatgctggcaaagccctcggggctcagcaccgagtagaccgcgttttccagcatgaggatgtggttggccacacccagtgccagcgcgccgccggaggagccctcgccggtgaccacggcgatgaccggcaccgtcaggccgctcatctccatcagattccgggcaatggcctcgccctgcccccgctcctcggcatccttgccggggtaagcgcccggtgtgtcgataaaggtgatgatgggacggccgaatttttcagcctgcttcatcaggcgcagagccttgcggtaaccctccggccccggcattccaaagttgcaggccagattttcctccagcgtagagcccttgcggtggccgatgaccgtcaccggcatcccgtggaaacgggccacgccgcccagaatggccgcgtcctccttgcactgccggtcgccgcgctgctcaaagaaatccgtgaacagggcagagatcgtctcatcgatgtgcggacgctccgggtgacgggccagaaagacccgatcctcggcagtcagcgggccgcaggagcgcaggatctcgtcctcttccaccgccagctctgccagttcggacgcatgggcggtgatggcctccatgtcactgccgctgcccttcagcgcggcgatctgtgcgtccagcggggccagctgctccaaaatatcttttatcattcgtgtttccctccggcatgaagctgcaggacctggatcagcgtatcccgcagctgactgcggggcaccacctgatccacaaagccgtgttccatctggaattcgctgcgctggaacccggcgggcagtttttcaccaatggtctgctcaatgacacgggggccggcaaagccgatgagtgcccccggttcggccagcatgatatcgcccaggcttgcaaagctggcggtcacgccgccggtggtggggtgggtcagcacgctgacgtacagcccgccctttgccgaaaagcgctggatggcggcgctggtcttggccatctgcatcaggctgaaaatgccctcctgcattcgcgcgccgccgctggccgaaaagatgaccagaggcaggtgcttggcagtggcgtactccacggcgcgggtgatcttctcgcccacagccgtgctcatgctgcccataaagaaccggctgtccagcacggctgccacacaggccacgccgccaatgcggccgacggcggtgacagcagcttcgtgcaggcctgtcttgttctgggcggcggcaagcttctccccgtatccggggaagttcagcacatcctgcggatcaaggtcagcgtccagttcccggaagctgccgtgatccagcaccagactgagccggtaatacccgccaatgggcatgtgatagccgcagttggggcagacatacaggcttttgccccacagggtgcgggcagcgcggcggccgcactgcttgcactccacaaactgcggctcgtgccagacagctccggcatcccgcttggccttcagctggaaagtgcgctcccgcatccggttggggagcagatctcggatatcattcatcgcatgtttcctcagatatgtgcggtgatgtagttgtagatgtcacccacggtcttgagctttgccagctcctcgtccgggatggacacaccgcaggcatcctccagcgccatgttcagctccacggcatccaggctgtcggcctccagatcctcggtcaggctggcctccatggtcaccttgtcctcctcgcagttcagggtgtcaacaacgatcttcttcatttcttcaaacgtcatggtaatattctcctttgattggtttgtatttttattatctaaaaagtttgaggtttcttgcgaacacgaccattatatctgaatcgtcggataagtcaagaataatagctaaaatattttatcttttacaattctgacacactttcctccacaggggcagttcctcttttccattgccctttttccccaaacgtgctaatatgggttcagcactcagacaagaaggaacgaaaggatggatcccatgaaattcagcgaaatgagttatacccgcccggacattgatgccctgctggcccagtgcaaggcgctggccgccaaggccgccggggccgccagcggcgaggagctggtgaatgtttactacgagcagagccgcgcctttgccgattacagcaccgccgcacagctggcaagcatccactacacctgcgacacccgtgacgcttattggaaggccgagcaggacttctttgatgccaacggtcccgctgtggagaacgcacgggtggagatcagccgggcatttctggccaacgcccatgtggacgcgctgaccgaagcctttggcaccacctgcgtggccggtatgaagaatgccgtgctgggcatggatgaccgcaccgtggagctgcagaaggagtacaacgcccttgtcagccagtaccagcaggtgtacggcggcgcactggtcgagtttgacggcaagcagctgaccattccccagctgggcccctataaggagaacctggaccctgccgtccgccgcgccgcctacgaggctgaggcagcgtatttcgatgcccaccgtgacgagctggatggcctgtacaccaagatcgtcaagaacctgaacgcacaggcgcagatcctgggctaccacgattacagcgagctttcctatgtacggatgaaccgcatcggctacggccctgccgagatccggaagttccgcgaccaggtggccagcgatgtggtgcctgagctgaaaaaggtgatcgagctgcgctgcaagcgcaccggcatctcccacctgaccttctccgacctgcctgtggcgtttcaggacggcaacccctctcccatccccggctacgatgcccggatggccgctgcccgcaccatgtaccatgagttgagccccgagaccgcagaattcattgacttcatgcaggacaatgagctgttcgacgtggagagccgccccggcaagatgtccggcggctatatgaccagcctgcccacctacaaggccccctttatctttgccaactggaacaacacctccgcagacgtggacgtgctgacccacgagtgcggccacgcctttgagggctatgtggccgagcgtgaccccaaggtccccgcagacctcgagtgccccggcatggagagcgccgagatccattccatggccatggagttcctgacggctccctggcaccatctgctctttggcaaggacactgagaaatacgccctgctccacgccgaggacagcttcctcttcctggcctatggctgcatcgtggacgagttccagcacaggatgtaccagaaccccgacctcaccccggacgagcgcaacgccgtctggctggaactggagcacaagtaccgcccctggatcgatttcgacaacctgcccttctatggccgcggtgccggctggcagcgccagctccacatctatgagtgccccttctactatattgattactgcctgtccaccatggcagcactgcagttcttcctgctgagcctcaaggaccacaaggatgcctgggagcgctacctcaagctggtgcgccgcgccggtctggccagctacacggagctgatgcagaccgccgggctgaaggttccctttgaggatggctcgatcaaggccatcgcccagcagatgggccagtggatcgcagagcatcaggtgtaagcctcccgggtctacggagattttttcttgcaaaatccgctcttttctatgaaaaagcacagcgcccccgttcactgtaagatcgcagtgagcgggggcgctttcttgtgaataggaggtggattttatcgcaaatacagactatggggatatacggagcggcacaaactccatgaccggaaagaaaaatttccataaaacgccaaaaagccctcggataagtcatacctatacaagaaagtttgaacttttcgtgaattttctgtgtttcgaccatggacaggtgggaacagttctgctacaatgggagctgttctttccgccggttcccacgcggcggtttttgtttttactataacacaggaggaactttcatgttagaaaagatctttcacctgaaagaaaaccacaccgatgtcaagaccgaactcatggcgggtgtcaccacctttatgacgatggcctacatccttgcggtcaaccccagcatcctgtccgcttcgggcatggatgccaatgcggtcctgatcgccacctcgctggcatcgttcgttggcactgccctgatggctctgctggccaactatccgttcgctctggctcccggcatgggcctgaacgcctacttctcctacacggtcgtcctgaccatgggttacagctggcagctggctctgatggccgtttttgtggagggcgtcatcttcattgtgctgagcctgaccaatgtgcgtgaggccatcttcaacgccatccccatgaccctgaagagcgctgtcagcgtgggcatcggtctgttcgttgcattcgtcggcctgcagaacgcaaagctgatcgtgaacagcgattctaccctcgtcacctatcagcacttcaagggcgagaccttccacagcatcggcgtgggtgcgatcctcgcgctggtgggcgtgctcatcaccgctatcctgctggtcaaaaaggtcaagggcggcatcctgtacggcatcctcatcacctgggtgctgggcatcctctgcgagctgaccggcatctacatccccaaccccgatgccggcatgtacagtgtcatccccaccagcttcatcagcttcgatttctctgctctgggcaagacctttggtcaggtgttcaagaccgatttctccggcgtgggcatcctgaacttcttcgccgtgatgttctccttcctcttcgttgacctgttcgacaccctgggcaccctgatcggtgttgcttccaaggccgacatgctggatgaggagggcaagctgcccaacatcaagggcgcgctgatggccgactccatcgccacctgcgccggtgccgtactgggcacctccaccaccaccaccttcgtcgagagcgcttccggcgtgaccgagggcggccgcaccggcctgacctccatgaccaccggtgtgctgttcctgctggccgtggtgttcagccccctgttcctgaccatccccagctttgcgaccgctccggccctgatcatcgttggcttctacatgatgggttctgccctgaagatcgagttcgatgatcctgctgagggcatccccgcattcctgaccatcctggcaatgcccactgcatacagcatctctgagggcatcgccatcggtgtcatctcctggaccctgctgaatgtcatcaccggcaaggccaaggagaagaagatcagccccctgatgtatgtgctgaccgttctgttcatcctgaaatacgtcctgctgtaacaggcatttgcagcaaacagaaagccccggctccggccggggctttcgtgcgtttattggttcctgcgcgggtggggcgggcagggttcagccgccgaacagcccgaaaaagctggtgtgcgtcatgcccagcaccagaaacagaagaatgagggcaaacagcactccaatgatgatgtccatctggtggaccgtgagggggaatttatcgtagagcttttccttggggttgacgaaattcgggtcgttgttgtccagcagagtcttttttctctcagcgctctgggctttggcggcggcaagttctgcctgctccttttccagctgggcctcccgctgggcaagcagtgcctcacggcgggccagctcttcctcccgctgggcctggttcatttctgccatggtggtatcctccggcgttttttctaccagtataccatagaattgtgacagaaaaaactcctcccgcaaaaagcggccttattccgccagcagatcctccaccacatccatcagctgagacggatcgagctggcacgcggtacagcgcgcagccaggcgaaggacctgcactggggcaacggagacatctgagatgaaccgcagttttcggtgtcgcccgtgagatgtagaatacgcggcgatgccaaaggatgtatacgcaccacacgcgggatgataaagtcgttccataacacaatgataccaaaacacaccaatcacctctctatcaaaattgtcacgccgctttgaaacggctgcatgaatgcaggttcgctgcccgcaaaatgttctgacaaaatttatataccatctcttggcttcaaaataaacagccaaaatttcgaaatttggcggcgtgttttgcatgtccggtgaaaccggtggtgcagtaaaaacacgaaccggaaaatggaaatgaatatttttacggaatatcgtagaaaatttagaaaaaatcaacttcacgcagcaacagatgaaagaatgctccgcagaaaaccgaaagcacaaaaagaaaaatctttgccgtggcttaaccactttttgacagaaaaagttgcaaaatcagtcgtaagatcggactttctggtatatcacttgttcgctgtgcggataaggcggctcattctgctttgcctccgcatcgtctgccgcagaccccggcgctgcccttgcctgaaccgctttcactccggatgcaaaccagatgaaaaatccgacggaccgcatcacttgactttccccttgcaggggagtatactccggggcagtgaaatattcggctatgacgagaaagagtacccggaaagaatgctgcagagagctgccggatggtgcaaggcagtgcagggcgtccgtgggaagatcctctccgagctttccggctgaatgggcggtgtatgcgccccagtaagcgggaacggcaggcccccgttatcacgggccgcgcattgttggatgcgcactgaggggccgggctttgcaccggcaataagagtggtaccgcagaggatttacgcctttgtctcttacaaaccgtaagggacaaaggcgtttttgtttgcgggaaagccattttccggatgtttcattgcctttgcatccgcaaaaatcgggacctggaaaaggagagtttaacatgaaaacactggaaaaagtaagcgattttgtaggcaagtatatggctgccatcgtcatcgtggtagcggcgctggccctgttcttccccggcacattcagcgtggtaaagaccgcatgggtcaacaccctgctgggcatcgttatgttcggcatgggccttaccctgaagccggaggatttcaaggtggtgttcagccgcccgaaggacgtgatcatcggctgcattgcacagttcacgctgatgcccttccttgcatgggcgctgacgcaggtgttccatctgcccactgaactggccatcggtgtcatccttgtgggcacctgccccggcggcacctcctccaacgtgatgacctatctgtccaagggcgatgttgcactgtccgttggcatgactgctgtttccaccgtgctggctccgttcctcaccccgctgctcactctgctgtatgccggtcagcgcgtggaggtgaaccccgtgaatatgtttctgtccatcgtcaaggtggtgctggttcccatcgcactgggctttgtggtcaatcacttcttccacgccttcacccagaatgctgtccgtgtgctgccgctgatctccaccactgccatcgtgctcatcatctgcgccgttgtgtccgcaaactccgctaagatcatggccagcggcctgctgatcctggccgtggttatcctgcacaacctgctgggctacctcaccggctttggcgtgggcaagctgctgaagctggattccaccaagtgccgtgcaatttccatcgaggtcggtatgcagaactccggtctggccacttctctggccgctgcccactttgcacagtatccgctggcaaccatccccggtgctgtgttctctgtgtggcataacatttccggtgctgtccttgctaacttcttcgcccgcaccgcagagaagaaggactgatggttcataagaacctcgaacgctcggaaaacccagtataactttcgatctgctgaacttataatagcaaaggcagggtgtcaccgtgatggtgataccctgcctttgcttgtttaccgttccgagtagtccttccgcaggaacttgccggggcgaggcccctccatcttgctgcgcaagaccgttctgttgcttgaaatccccactggggcgtttgttgcttcacaaacgcggttttgttggagcgtgcctgccccaaaccctgcttcataatattgatcatgatcgatcaacgactgatttatagtaattgccaaagtctgcaagtgcattgacgattggtaacatttccgttccgagatcggtcaacccatattctactttgggaggattctcgtgataatcacggcggtaggcaagcccatcatcaatcatctgtcttaagctctcggtcaaaactttctgcgagatcccgtcgatgcttctttgcagctcattgaatctccatggacgttctttcagattgcgcagaagcaagagtttccattttccgccaatcagggatactgctgttgcaaccggacattccggcagttcttcttttgtacgcatatcagtcacctctgtatatagtatagcacattcatttttgagtgtacagttacaaaaaggtgcgtacttgtttttgaatgtgcgagcttctatacttggctcaggcaatgaaagattgcgaatcaaaatggaggtgcttacaatggcaagctacacaaaaatgacagttggaaaggaaaatcggacggagcttcatgaaaagctcgccctgactggtgcggagatcagcctgaatacgcttcctgcgggagcaaatgttccgtttgtccactcccacaaggcaaatgaggaaatctacggtgttctttccggcaaaggcaaggtcgttatcgatggcgaagaaattagccttgcagcaggcgactggctgaagatttctcccgtggcaaaacgtcagttctttgctgcaagcaattctgagatcacttatatttgtattcaggtcaaggagaattctctcgaaggctatactgcaacggatgctgtgatctactgataaaacatatcaaaacaaaaggcaggataccaccatcatggtgataccctgcctttgctcatttaccgttcggttgctgcggtaaacttcaataaacaaaaaagtacccgaaccctttttcgtaaagaatcgggttcgggtacgaactgtatggtggtgaatcgtcacatggtgataagaacattgatgcaaagctccagcgctttccgcaaagagccctttccccaatctctctcatcatgagcataaacattcgcaagggaatcggcagtgtagagaatctggccaaagactgcaccacgcttctgggcacaggcggtcagtgcagcacactccatttcaactgtggcacagccctcggatttgcgatattctaccatatctcgtgtttctcggaaaaaaccatccgttgtccatgtgatacatttttgaaacggaatattcaacgcacaaaaagtctgctcaatggcttttattgcggaaggctccaaatcaacaaaccgagcggctggaagataatgatacgaagtgccttcatcgcgcatcgccctgattggaatcaagaa

SEQ ID NO: 1167 - DNA, 44888 bp, unidentified
  source 1..44888: mol_type = unassigned DNA
cgcctgcgggcggagccccctcgcagagggggccaaggggtgaacgcacctttttcgacagtctgaggggcgggcgttgcccgcccgtgcccgtttgccctgtgataaatttccccgaaaagacgatgctgcgccaagttggcgggcgagcaatgctcgcccctacactcgctgtatgtcgaggaacgattttttacactttccacaatcttttgcctaaaaatttttacaaaaaatccgaaaaaactgtttaaatttccacaacaatgtggtaaagtagtatcaaacaggcgggagtgttcaaaaatcactgcgccgcaatgaaattctacgccgcagggctgccggaagcagccccggcgcgaaaagaggtttgacgatccatgggctacgcaagcaaagacatccgcaacattctggtggccggccacgccggctgcggcaaaacgacgctgaccgaggcactgctgtacatgagcggcgcttccgagcgtatgggccgtgtcgaggacggcaccaccgccagcgactttgaccccgaggagatccgccgcaaggcatcgctcaactcgagcgttgtccccgtcgagtacgagggcatcaagtacaacctgatcgacgcaccgggtctgtttgattttgagaccggcgctgccgagggcatcatggccgccgagagcgtgctgatctgtgtgtccgggcgttccggcgtgaccgtcggtgccgagaaggcgtaccagctggcgctgaaaaacaacaaggcgcggatgatctttgtcaccaaggctgatttggaaaacgccgactactttaagatcctggagcagatgaagatcaagttcggccccagtgtctgcccctgcgtcgtgcccgtccgtctggacgacggcaccgtcgcctacatcaacctgttcagccagaaggccttcaaatacgaaggcggcaagcaggtccagatcgacctgcccgacatcggccaccgctttgagggcctgatccaggccatgagcgaggccatcgccgagaccgacgaggctttgatggagaagttcttcgagggtgaggctttcaccacagaggagatcgtccagggcatggcctccggcgtgcgcagcggccagatcacgcctgtgttctgcggctccgccgtcaacgcgcaggcactggatatgctgctctacaacatgaacgtgctgctgcccggcgcggacaccgcgtccgccgtgggcgagtctggcggcgagccggtggagatcaccgccgaccccgccgccccgctgtgcgcctacgtctttaagactgtggccgacccgtttgtcggcaagctgagctttattaaggtgctgtccggcaggctgaccgcgacgagcaacgccgtcaacgcccgcaccggccagccggagcgcctgggcaagacgctgaccgtctgcggcaaaaagcagaccgacacgcccgaaatcgccgccggtgacatcggcgcagttgccaagctggccaccgccaagaccggcgataccctgtgtgaccccgcccgcgtcgtggcgctgcccgcacctgtgtaccccatcagcagctaccgcatggccgtcaaggtcgccaagaagggcgacgagggtaaggtcggcagcgcgctggcccgcctgatcgaggaggaccccgccatccggttcgtggtcgaccccgaaacgaagcagcagatcatcagcggtctgggcacccagcatcttgaggtcgcgctggccaagctgaagaataagttcggcgtcgagatcacgctcgagaatccgcgcgtgccgtaccgtgagtccatccgcaagagctgcaaggcgcagggccgccacaagaagcagaccggcggccacggccagttcggcgacgtctggatccagttcgagcccgtcgaaggcgagggcatcgagtttgccgagaacgtgttcggcggcagcgtgccgaagaacttcttcccggcagtcgagaagggtgtccgtcaggccgccgagcacggcgtgctggccggttacccgatggtcggcatgaaggccacgctgctggacggcagctaccaccctgttgattccagcgaaatggcgttcattatggccgccaaactcgcgtataaggccgccatccccgaggccggccccgtcctgcttgagcccatcggcgcattgaaagcccacgtccccgccgacaacaccggcgatattatgggcgaggtcacgaagcgccgcggccgcgtgctgggcatgaaccccgatgacgacggcctgcaggtcgtcgaggccgaggtccccgtggccgagatgcaggacttcaccaccttcctgcgccagctgacccagggccgcggctacttcacgttcgagttcgtccggtatgagaccctgccgcagatgctcgagaacaaggtcatcgagcaggcaaaggcattgggcaactttgcggatgaggattaaatcgtaaataaaagcacctgctgaccggtatgcgtgtgaccggccagcaggtgctttttggttgagatattgaaagcttctttgcttactttcttctcgaagaaagtaagagaaaagggagcctgcggaaaggtgccaaagcccctccggcctcgcaggctcggccagtccttcggacccgaacccctctgtcgcttcgcgacatctccccgcgcagcggggagtcaccccgcaatgcgaggagcttttttgcgggctccgcccgagaaaagcctcccctcacaggggaggtggccgagcgcagcgatggccggaggggcttcttgccgttacccgctagcaccggccctccgggaagcggcgggccgggcatgcccggcccctacagcgcagcaaaatgaaagcccgcagtcaccaccgtagggggcggcgtcctcgacgccccgcacagcagcactccccccatcacgtgatcttcaacgcccgctgcacgcggtacacaatgtacttgaacagcccggcgatcagactgaactccacccagacataattgggcaggttccgccacttgaatttcggtttgtttaccttcggcagcgccgcccacgcctcgcggaagcccttcgcgtaatccccgccgaagccgcgcagccggaacataagcactttgagcagataccccagcagcatcgggataaaattcaaaaccaacatcaaaagcggctggttcttgtagggcagcagaatgctgttgcgcccgctctggatgctcttaaacgggttgtagcgcaccgcgccggtggtcgcgccgcagatgtggcggcagcgggctgtggggcaatagacgttcctgtagccgaaattgttcgcacgccagctcaaatcgacgtcctcgtaatacgcgaaaaacagctcgtcaaacacgccgatctcgtccagaatcgacttgcggtagagcgccgcgccgccgcacgcgctgaacacacggcagggctttgtatagcggctggcctttaagccgtcgccgcgcttgcaggcaaagcccaggatcgtcacgtagtcgcccgcgtcgtcggtcagatccggctcatagtagcgcagcatcaggctgctgaccgcaaaaattttcgggtcggcgtcggcggttttgatcagctctgccagccaatccggctccgcaaaggcgtcgttgttgaacagcgccatgtattcgcctttggcaatcgcaatgccctggttcaccgcatgggaaaagccggtgttcccggcgttctcaattaaagtgtagcggtcccgcccgcagtagctgcgggcgatgtacaggctctcgtcggtggagccgttgtcaatgacgatcagctcaaaatcctgctcggtctgcgcccagacggactcgatggaatcccgcagccagcctgcgccgttcaggttcgggatgatgacagatgctttcatggcgcctcctcaacggtaatagtagtaggccagctggctgtgcagcacggcggtaaacaccatcgcggccacagccacaaacaggatgaccagccccgccacgaccagcgcacggatcaggtacgcccgggccagccgcctgcgggcggggtcctgcgtgccgccaaagctccacaccaccgccagcacgaacccggcgatggggatggcgaacagcagcatggccgccgtcgtcgcgccctggctcatggcgtcgatgcggtcctcctccaggtcctgctcgtacagcggctcgccggtctcaacggtgccctccggggactggcgcatggcccccggcagggtctcgcccatcgggatatgcggcagcggtgcgccgcacttggggcaccgctcgtcgtgcggggcagtcagcagaccgcagtttttgcaaaaatgtgccataaaaacctcgcttattcgtcgaattccagaccgcggtccagctgggtgttcaggatgatctgggtgttggtggagcccatcttctgcatcttggtcagcaggtgctccagcgcgtcaatgtcggtgcagcttaccttaattataaagttgtagctgcctgtcacgcggaagcactgcaagacctgcggctcctgctcgatcatggtcagaaagctcgcgcgggtcgctgcgtccaccagtaccgagatcagcgcctcgacccgggcgggcgcgtcggggtgacgcagcacgacagtgtacccgccgatgacgccctcctgctccagacggtggatgcggctggatacggcgggactggtcaggctgacccgctgggcgatgtccttaacgggcatacgcgcattttccgccagcagttgtaggattttgtggtccaaatcgtccatggattgactccttgtcgttgttttgtgtaatgcgcacaaaaaaataaagtgaagtatacaatcactgttatctttaacaaaattggaaaagtatgcttttttgtgcgcttgctaaataaaattaagtaggaatgactttattataatcttttgaaaaccaaaatgcaagtctgacatttgacattttaagaaaacttgctataataatatttgtaatcaatcaagacattcactgacctttatatactttcccacccctctatgcacaaagccccgcaggtactacctgcggggttttgtgtttgtgttggcaggacacaacgtgggaaagcgtgcaagaattgggggctttttgccttcccccgcgggggaaggtggcccgcagggccggatgaggggcgtgtgcacggcagcagcctgtaaacgggcagcatctgcaaggtcgaccctcatcagtcagtggtcggggccactgacagcttccccctccggggggaagccatgcgcgcgaaaggctgcatttttacattttaaaccccgccccgtttgacggcgcctggactgccgtggtataatataatttccgacacataacgtgcatttttaacggaggaatcaatatgctcatccctgtgctgctttttattgtcggtctgttgttcctgatcaagggcggcgactggtttgttgacggcgcgtccgcactggcccgccgcttccacctgccggagctgctcatcggcgcgacggtggtctccatcggcacgacgctgccggaggtcatggtctccacgatgtccgcactgtccggccatggcgagatcgcctacggcaacgccatcggctcggtcatctgcaacgcggcactgatcgcggccatcacgattgcggtgcgccccggcagggtagaccccaaaacgctgaaaacccccgtcgccttcttcttcgcggcggcggccatctactgcattgcggcttatgttttcggcagattcacccgcgtcatgggcatcatcatgctggcaatgtttgtggcgtacatggccgccaacgtgctgcagatgaaaaacacccccgccggtgagcaagaggcgtccgaggaggaggaaatgcccctcgccaagacgctgatcctgcttgtgctgggcgcggtgttgatcgccgtcggcgcaaacctgctcgtggacaacggcaccctgatcgcgcaggcactcggcgtgcccgagagcgtcatcgccctgacgtttgtcgcgctcggcacctcgctgcccgagctggtcacggccatcacctcgctggtcaagggccacaacgacctgtcgctgggcaacatcgtcggtgcgaatgtctttaaccttgtgctggtcagcggcgtgtcgatcacgctggcacccttcaccatcccgcagagcgccacgctgttcggcatcaattccagccttgtgctggatctgccggtcatgctggccgtcatgctgatcctgatggtccccgccctcgtcaagggcaagctgaaccgcgcccagggcatcctgctcctggcgatctacgccgccttctgcgcggtgcagtttgcgctgtaaagaaaaaggcttcatcgcccatgtggacgccctcgccgacgtgcgccgcgcctttgcacagctccaaaccgtctacggcaaggcgacccgcgccgccaacccggcgttcgccacccaaaagacagaatagaatttccatgcccggcatacacttccgcgaggtggtgtgtatgctgggcatttttggtttgtttttgcaggcggcggcagggcatattctgtatctggcgctgcatctcgaaagcgggtccttcccgcgtccgctcccgccggacagggagcgcgcggcctttgccgatctgcaaaagggcgaggcagccgccgcacaggcgcgggatacgctgatccgccacaatctgcggctcgtcgcgcatatctgcaaaaaatactatgccgggaacagcgcacaggacgacatgatctccatcggcacgattgggcttatcaaggcggtggataccttcgaccccgccaagggtaagcgctttgccagctatgcgagcagatgtattgagaatgaactccgcatggatctgcggcgggggcggcggacgggagtgacgctgtcgctgcaggagccgctcgaggcggacgggcagctgacgctggcggacaccctgcccgatgaagccgacatggaggccggctgcgagagccgcgccgacgccgcccggctgcgagcgctggtggacgctctgcctgcccgggaacgcgctattatgcggcagcggtatggatttgacggtgcgcccaagacccagcagcagacggcgcaggcgctgcacatcagccgcagttatgtttcgcggctggaaaagcgcgcactcgagtacctgcgcggccggtggccggcggaatgacaagaactgcgcaaagagaatgcaatcaactaaaaaatgacgggggggggtacacaaataccatttgcggcaaatgtgcggcatgatgcggcagagtgcgccacatatatgccacacatttgtaaactgtcgaatctatgacataaattgggaaatgcacgaagctgcccgctaaatgtgtcagatttgtaaagccgttataaaataacccaaaaaacttgaaaaattttcggaaactcattgacatttcgctgacaagcggatagtatagaagcgtagacaatttttaaagcgaggtataccaacgtgcatctgacaaaaagcgaacaacagatcatggaaattttttggcaggcggatcacgcgatggcacagacggaagtcgtgaaaacctgtgttgaccgtaaatggaaggaacgctcgattttctcgatgctgaacagcctgatggagaagggcgttctgcgggaggttggcttcgtgcgcagcggtaagacctacgcccgcacgtttgagcctgccatgtcccacgctgagtacctggcctcggtcgttgcagagcagctgcccgcgaagcagctgcccgagctgatcgcggccctgatgcagaaggtggaaacgacccctgccatccagaaggaaatgcgtgccgccctgcgtgaaaacgcacagtaatcaatgatttgttcaaaaaagcaccgccgacccgcgacccggatcggcggtgttctttattagaaaggatggctctgccggggcgaacttttcgttcgcccgctggccgtatgcggcagaggcaaggtgcccgggcggatatggaatccgcccctacgcggtaggggacgatgcctgcatcggttcggagggtctgcggctgccgcgcgtgcccggcgggcaaacacagcgcatcccccagccgtcttaaaaagtgggcaaattaccccaggatgccgctgtttttgatcgcctgtacggcctcgccgatcttctcaacgggcatcgtcagggcaaaacggacgtagccctcgccgctcgggccaaagctcgagccgggggtgcagatgacgccggccttgtcgatcagggccaggcagaattccatgctcgtcttgtacccggcgggcaccggggcccagacaaacatactgccgtgactgtcgggcacattccagccgatgccgcgcagaccgccgcacagggcgtcgcggcggcgctggtactcgccgcactggcgctgcacgccgtccagcgggccggtcagggcagcgatggcgaccttctgaatgggcaggaacataccgaaatcgatctgggtgcgcagctttttgcaggcggcgatgacatcgcgccgtcccaccaaaaagctgatgcgcgcgcccgtgacgttgaagctcttgctcaaagagaagaactccaccgcgcattccccggcgcccggcgtgttgaagatgctgccgccgtgggcaccgtcaaagataatatcgctgtaggcgttgtcatgcaccagcaaaatgtcgtacttacggcagaaattgacgatttcggcgtagagctccggcatgccgatgctgcccacggggttggcgggcaggctgaccagcatgagcttggccctgcgggccacgtcctccgggatggaggtgacgtcgggcaggaagtggttctccttcgtcagcttgtagtaccacggctcggcaccgcccagcttggagccggtcataaagacggggtagcaggggtcgggcagcagcaccagatcgccgtcgttgcagagcgccaggcccagatggccgataccgtcctggctgccggaaaagctcatgacctcgtcgggggtgatggtgtccacgttaaagcggcgcttgtagtagccgcagacagcctccagcatctcgggcaggtcgcgcaggctgtacttccagttttcgttgtcctgcgcggcgtcgatgagcgcctgcttcaagtagtccgccggtgcaaaatccggcgtgccgacgcttaaattgtaaagatgacgcccctcggcctccaacgcgacctttttgtcgttgagcgccgcgaaaatctccggcccgaacaggtccagacgacgagaaaactccatatcccaaaacctcgtttattgatgtagctttatacaaaaaacgcatattttcttgtataaacatcctcattatacgccgccgcgccagcgcttgcaagggggttataaaagaggtataataaaaattaaattaaatacgaatatatgccgctcgccttccttgcctccctctgcgagacagactcccccgggacgggggaggtggcgcgcagcgccagaaggggagcggtggccccgcagggccggagggagagaactgtgccattgtccgaaatatttcgggctgccgcaaacttctctcccccagccgctgcggcggcagccccctcgcagagggggccaagaggggtatcccgcgaacaatcgcaagaaacaggagaataacattcatggacaaacgcaataaaaccgctctggcttatctgcttgtcggtgtggcggcggcggggcgcgccctgctggccgtgccggaaaatgccgccatacaggaagtctcgctcaccgtgctggcccttgtgggctatctgctgctggcctccaaaaccaggctgcctaccgtgttcggcgcggcggggcttgtgctggagctgatcctctgcggtagccagaccggcggggcgtgggcactgctggccccggcgctgcgcgcggcagacctgtggctgttctggggcgcggcgctcgtgctggtgcggctggcagggcggcagcaaagcaaaatgccgtacattgccgccgtgccgctggccgtctacaccgtcacgcactttatcccgtcgctgacctccgtcgccgccgtcagctttgtggtgttcagcgtcgtcatgctctggtttgcggccattatgatccgcgcctataacgacgcacgcataaaaaaataaggcgattttgcgcaaatctgttccgcgataaagtgacaaataccgcaaactgtgttatactaaatacgattataaaaatccagctggaaggaaggcttttactatgatcccttttaacgtaccaccctgcgtgggcgacgagctcgactacgtcaagcaggccatcgactctcataaaatctgcggcgacggcgcctttaccaagcagtgcaacgcctggttggaggagcgcttccacgcccagaaggtcctgctgaccaccagcggcactacggcgctggacatggccatgctgctgtgcgatattcaccccggtgacgaggtcattctgcccagcttcaccttctccagcaccgccaccgccgctgtgctggccggggcgaagctcgtctttgtggacatccgccctgatacgatgaacatcgacgagacgaagatcgagcaggccatcaccgataagacgcgggtcatcgtcgccatgcactacgccggtgtcgcctgtgagatggacaccatcatggacattgcccgccgccatgacctcaaggtcgtcgaggacgcggcgcagggcgttatgagcagctacaagggcaaggcactgggcaccatcggtgatttcggctgctactccttccatgagacaaagaactactcgatgggcgagggcggcgcactcgtcatcaacaatcccgcgtacaatgagcgcgcggagatcctgcgcgagaagggcacgaaccgcgccaagttcttccgcggtcaggtggacaagtacacatgggtcgattttggcgacagctacctgcccagtgagctgaacgccgcctatctgtgggcgcagctgctccacgccgacgagatcaacgacaaccgcatggcgacctggaacgcctaccacgatgccttccggccgctggccgacgcaggcagggtcgagctgcccaccatcccggcggactgcgtgcacaacgcccacatgttctacctgaaatgcagggatctggaggagcgcaccgcgctgatccgccacctgaaggcaaacgatattctggccgtgttccattatatcccgctgcactccgccccggcgggccagaggtttggccgctttgacggtgcggacgtctacaccaccgccgagagcgagcgcctcgtccgcctgccgatgtactacggcctgaccgaggcagaccgcaataaggtcattgccaaggtcctggaattttatgcgcagtaaagccctgcccggctgggcgcacacactctgcaccgctgccgccgcgctggtgttcctgctggcgtatgagctggtcgtctacagggtgccggtgacggagatcttcctgccggtcagctcctggagcgacgaggtcatctacagcaagcagctggccgccgccgtgcagtacggcgcgccgcaggggtacttcggcttcaatgagtcgcacgccgccgtcggcacctacgccgcgtgggggccggcggtttttctggtctatgcgctgccggggctgcttttgcgcgggcagaatgcctttttgtggtgcaacctgctgttcgtcgtgctgggctggacgtttttcgcccgggccgcgcggcttggctggaagcgccagctggcctttgccgcggcgctggccgccatgaacgcgccgatccgctatgtgttctccgccatgcaggagccgctgcactatgcgctcatgctggcggtgctgggctgtggcattctggcgcggcgggacaaaagccgcgccgcgtgggcggggctgtgtgtgctgtgcgcggttgccacgcttgtgcgcccctatgaggccgtgctctggctgttcccgctggcgctgtgccggcaggaccgccgccgcatcgctgtctgcgtggcgggcggggcggtttccttgggcggcacgctcgtgctgatgtccaaattctacgcgccctacttctttaccaatgtcgatgtaagcccgctgcaggagttggcccgcgggcaggtggtctccgccgtcagggacgtggcgcacaagctgctggacgccctgcgcaccgtggccgaaatgctggccgaccagctggcaaaccgcagcgggggacagtacctgctgtttttcctgctgctgggcgtgacgctggtctgcctgatcgtggatgcccgcgccgggcggcccgtgttctggaagggctgcgctgccgtgactgcggtcatcgtctttctggcgctgctgctgatgtaccgccccgttgagggctcccgccatacgcttgtactggatgtgctgctgctggcggcgctccttgtggaggacgcccgccccgccgcgggcacggcagccgccgcgctggtgctggccgcgctcggcgtgctgaatctggcggacggcttcaccatgccgcgctacagcgccgaatgggacgccgcggtgcagcaaatcgaggccgcgctgaccgagagccggtccgctgtgacgagcgccgacccctgggacagcaccgtggcctacgcctttggcgaccccgtacactgcggtttgctctacggcgtgccggacggcatgggcatccagtttgacgaggccgcctacctgaccgacccggcccatgagattcattcccgctacgtcctgactgccgccgacacccccaccgccgcccgcttacaagccgacggctggacggtgctgtacgagagcgacaggggcgtgctgtacgaacacggcacaatgtaggggccgggcatgcccggcccgcggccttcccacaggcgtccgtcctatagccgtgggtcaatgcaagcatcgccccccgcaccgtaggggcggattccatatccgcccgggccgtctgcccaaaacaacgaggtaaacccatgaacacacccactctccccgtcctgaccggcacagcggtcacgctgcgccccatcaccgacgccgacacggaccttatcgtcaagtggcgcaacacgccgtctgtcgtgcagaacttcatcttccgccagaccttcacgccggagatgcaccgcagctggctggcgacgaaggtcgccaccggccaggtcgtgcagtatatcatcctcgacaacgctgacggcaagcccgtcgggtcggtctattaccgcgatattgacaaccacaatcgcagcgccgagtacggtatcttcatcggtgaggaaagcgcccgcggcaagggccttggcaccgaggcggcccgcctgttcacacaattcggcgttgatacgctgcatctgcaccgcatcagcctgcgcgtgctggccgaaaatgccgccgcccgccgcagctatgaaaaggccggctttgtgcaggagggtgttttccgcgatatggagctgctggacggagcctaccgcgacgtcgtctttatggccaagctggcggagaactgacgtgaaaagaccgatgcaaaaaatccgaacctgcctgcaaaagacccccaatgcgctgctctgcgcgttgggggcagtcgtgttccttgcgggcttttactttttgtgctaccgcacgccgctgaacgaggtctggctgcctaccacgatgaacaacgacgaggcgctctataaccgccaggtcgtcagcgtgctgacccacggcggcccgcaggggtacttcggctatcaggaatccaccgcggatattggccgctacggtacctggggcccgctgctgatttgggcctacgcgctgccgggtctgctgttcggtgccagcgtaaacgtcgtgctgtggtgcaatttgctgctgattgccgtgggcatcgcggtgtttgcccgctgcgcgcggctgaattactggcagtgcatcgcgctgtgcggcgcactgttcagcatcatgctgccgcttcgctcctgcgtcagcggcgcgtcggaggccatgcactacatgctggctctcctcatcgtcggcacggcggcggccctgcaccgcagcggcaagactggctggctgattgcctgtgccgcggcctgcgcggtggaaacgatcttccgcccctacgcgctgctgttctgggtgttcccgctcacagcggtctggcagaataagcgccgccgcgcggcctgtttgggcacggcggcgggcgggttcgcggtttcgctgttcgccatggccaagctcgctgcgccctatttcagcgacggcggcatggactttgacggcatccgtctgttgttgcagctccatcccgtggcggcggtccgctatgagtgcgcccgcgccgcggccctgctgcacgcggcctggcgggacgatattctgcccacactccacggtgagacgacctacatcggcggcggctgtgtgacgtttttggccgttgtgctcgtcgcggcggtctgccttgtctgggataagcacaaaggccgcccgctggtgctcaagggctgtgcgctgctttgcagcgcggtcattgcgctggtgctgctgttcatgtacaacatcgacccgcgccacatgatgctgctggccatcctgctgctgggggccgtcgttatcgaggacgccgtgcccgctgccgtctggctgccggtgctcgtcgtcctgctgctgccgatgaacttccagcgcggcagcctgcccgagaaaaacgccgaaatggccgcccagatgcagaccgtcgaggccgccctgaccgccagcgtgcaggatgccggggccgacccctgggaccacacgctggcctacgcctatgacgacggggtgttccacggctacctctacgccgtgcccgcgggtatgggcattgaatttgacaaaaacagctacctgtgggatgccgaaaacccgatctattcccgctatgtcatgtgcggccacgacacccgcgttgccgcccgtctgctggccgagaactggcagcaggtcgtctccaccgaggatctggtgatctataagcgcccgtgagcgcagaaggaagtacacagctatgcagaaaatatcttacgtgatcccgtgctaccgctcccagcatacggtgggcggcgtggtggcggagatcgccgccaccatgcagaccctgccgcagtatgactacgaggtcattctggtgaacgactgctcaccggatgataccttcggcacgatccgcagccttgtggcggcggacagccatgtcgtgggcgtcgatctggcgaaaaacttcggccagcatgcggcgctgatggcgggctttcacaagtgcagcggcgacattgtcgtctgcctagacgacgacggccagaccccggcggacgaggtcggcaagctgctggcaaaaattgacgagggctatgacgtcgtctacgccagctacgacacgaagcgtcaggccggctggcgcaacctgggcagctgggtcaacagcaaaatgaccgagatcatgctgggcaagccgccggagctcgtcgtcaacagctactttgcggcgcgccgcttcattgtggacgagatgctgcgctatgagcactgctacccctacgtcatcgggctggtgctgcgctccaccaagcgcatctgcaacgtgccggtgcaccaccgcgcccgtgaggagggccgcagcggctacacgctgagcaagctgctgaatctctggatgaacggctttacgtcgttttctgtcaagccgctgcgcattgcgacctacatcggcacgttgtttgccgtggcgggctttctctactttatctatatcatcatcgaccactttacccgcgcggcggcccccatcgggtgggcgtccaccacggcgctgctgctgctgctcggcggcatgatcctggttgtactgggcattatgggcgagtacgtgggccgcatctacatgtgcgccaacgccgcgccccagtacgtcgagcgcgaagtcatccggcatgaggagaacgacgcatgaagcaggcgaaatggttcctgctgctgcatgtgatcctgggcatctatgcgggcagcagcgtgtgcagcaagctggccgcgcagcagccgtttttgagcgcggcgtttatcgtgctgtacggcctgatgctgttggcgcttgtcacctatgcggtgggctggcagcaggtcatcaagcatctgccgctgacgacggcctacgcgaacaaggccgtcaccgtggtgtggggcattctgctgggtctggccgtttttggtgaggccgtcacgccgcgccgggtcatcggtgcggtcatcattatatgcggcatcgtgctttttgtacgggccgacaatgagggggagggcggcgaatgagtcaggcacagctgccctatgtgctgctgtatctgtgcagcacgttcctctccgcggtctcgcaggtgcttttgaagaaggccgcgctgcgggagcacaagtcggtcttggcggagtacaccgactggcgggtgattttaggctatgccctctttgtgggctgcacgctcttaacgatgctggcctacaagggcgtaccgctcaacgtcgggcctgtactggaagcaacaggctatatttacgtcacgattttcggcgttacgatcttccacgagaagatgagccccaaaaagctcgccgcactggcgatgattttggtcggcatccttgtatatgcgctgtaactaaaaacgtcctgcctgcaacattgcgcagacaggacgttttttatttgggcatttggaatttctttggttctttctttgcaaagaaagaacacccgtactcttgtttacagcctctccggcacgcggcgctcgcggcgctgcactgggcttctctgcaaaacggtggcggcttgatccagcaacagcgccagcagcaggccaaacaccacgtcaatgacactgtgctgcttgagcagtatcgtggacagcgagatcgacacacacagcaccatggcggcggggcgcatccagcggcggcgcggggcatcaaagattgcactgcggtagtacgccagcatcagcgtgaccgagttgaacacatggatggacgggcagacattcattggcgtgtcgctgcggtagatcatccgcacaagctgcgcaaaaatgtcggtgcccggcacgtatttcgggcgcagggctaggccgttaggcacaatggcatagaacagaagcgtcatcgtcatgccggtgaacagcggaatgcacagccgccagaaatcctcccgcggggccttatacagcagataaaacagcgtaaacggaatccacggaaaccacaaaatatacggtacaatggcatatttgcagaacgggatcaaatcgtccagctggcagtgtacccacagatccggtgtctggatcgtgcgctccagcagcgcaaaaaacgataagtaaaacaaagcatagagcgccatgaaccagacaggatggcgcgaacaccagttacgcatacatttacaccctttcgatgatgtactattatacgccgcacgcggcgcacaaaacaagcgacaatctgcacaattcgcagctgcattttcgacaggatattgtggagattttgtctatgccgccttctgtatactaatacgaatggccgcgcgggaataatgcgttacagatgtgaaagagttgtaaacaaacaaatggcggagcggtaagggccgcaaaaaggagcccgtcactaagggacgagttcctcggcttatactgtattttactctcccagtaccgcgggatggccggtcggggtgtgctcgctctggaacttcagcgcggcggcgatgaagctcttgaacagggggtgcgcacggttcgggcggctcttgaactcggggtggaactgcgcgcccagatggaaatcgcggcccgggatctccacagcctccacaaggcgtccgtccgggctggtaccggcgatgaccagacccttctcctcgaactcggcgcggaactcgttgttgaactcatagcggtggcggtggcgctcgtcgatctccgtcgtgccgtagcagtcggccatcttcgtgcccggcgtgatgacgcaggggtacttgcccagacgcatcgtgccgcccttcgtctcaacgccctgctggtccggcatcaggtcaatgacgttgtgctggccctcgggcgtaaattcgctggaattggcgtcggcgtagcccagtacgttgcgggcgtactccatgaccatgatctgcatgcccaggcagatgccgaaatagggcacgtggttctcacgcgcgtactgcgcagcctggatcatgccctcgatgccgcggtcaccaaagccgcccggcacaatgatgccgtccgcgtcgcccagctcgtcggcgcagcagtcctggtcgacgagatgctcactgtcgacccacttgatctcgaccttgctctcgttctcaaagcccgcgtggtacaggctctccatgacgctcaaataagcgtcgtgcagcttgacatacttgccgaccagcgcaatcgtgcaggtcttgctgcgggtcgcaatgcggctgatgagcgccttccactcggtcagatcgctcggcggggtctgcaggtgcagctggcgggccacgacgttcgtcagaccggcggattccagcatcagcgggcactcgtacaggctcggcatcgtcaggttttcaatgacgcagtcggggcgtacgttgcagaacatgctgatcttgcgcttgatgtcgttgcctacagggccgtcggcgcgcaggacgatgatgttcggcgcaatgcccatgccctgcagctccttgcaggagtgctgcgcgggcttggacttgtattcgtcggagccggagatgtagggcaccagtacgacgtggatatagcagcagttctcggggccctgctccagaccgacctgacggatggcctccaggaagggctggctctcgatgtcgccggtggtgccgccgatctcggtgatgacgacgtccgcctcggtgctcttggccagattatagatgtagctcttgatctcgttggtgatgtgggggatgatctgcacggtctggcccagataagcgccctgacgctccttgttcaggacgttccagtagaccttgccggtggtcaggttcgagtatttgttcaaattttcgtcgatgaagcgctcataatggccaaggtcgaggtctgtctcggtgccgtcgtcggtcacgaacacctcgccgtgctgcagcgggctcatcgtgcccgggtcaacgttgatgtaggggtccagcttctggctggccaccttcagtccgcgggtcttgagcagacgtcccaggctggccgctgtgatgcccttgcccaggcccgacacaacgccgccggtcacaaaaatatacttcgttgccataattcaccctccatgtcggcggatgccaaacaacagcgcccgccatatcccaaaaaattatcctttccattatacatcgaaaaaaacagcttttgcaatatggcgggcatattttctttattaaatttgaaaaaagtgggttttactttggattctttagcgagcgtccgcgtacttcaggatctcgccgatcagcaccttcatgtccaacggcttgcccacgtggctgttcatgcccgcgtccaggcaggccttcacatcgtcggcaaagacattggccgtcatggcgatgatgggcgtgccctcgccgggccccttgccctcaaacgcccggatgcaccgggtagcctccagtccgttcatctcgggcatcatgacgtccatcagaatcgcgtcataggtgtgcggcgcagcgttctggatggcttccagcgccagtctgccgttctcaacggcggtgatgctggcaccctgctcctccagcagggttgtggcgatctcgctgttcagctcgttatcctcggccagcagcaggtgcagcccggccagcggcagcacagtttccgctgccgcgggggctgctgcggcagtctctgcccccgcggcgggggcatcttcccaactgctgccggacgcggctgccgatgcggcatgccgcacgaccacggacggctcggccttgggcggtgtgcccaagggcagcgacagccgcacaatgaaggtcgaacccttgccgggctcactctcgacatcgagcgagccgtgcatctggtcaacgagcttctttgtgatggccatgcccagacctgtgcccttgtagtgggtgcggctcgagcgctgctcctgcgtgaacggctcaaaaatatgctgcaggaattcctcgctcataccgatgccgttgtccttgatctccatccgcaggtggacaaaaccttcttcaaacagcgtttccttggcgcggaagttgatctcgccgccgtcgggcgtgtacttgacggcgttggaaagaatgttgataagcacctgccggatatgcagctcactgccgatcaggtacgggtgccagaacgggccgatctgctttgtgaaggtcatgtgccggtccacgatctggccctccacgatggagcagcaggaatccagcagtacccgcagatcaaacgatgtgtccagcatctgcatattgccggattcgattttggtcatgtccagcacgtcgttgatgagggagagcaggtgggatgccgcaccgcgcatctttgtcatgcagtcccgcacgcgggccttgttgtcaaagttgtcctcggcaatgtccagcatacccataatgccgttgatgggcgtgcggatgtcgtgggacatgttagacaggaactccgtcttggcgacgctggcttcctcggccttgcgcagggctttttcggtctcggcgcggaaccgttgggcgcggatggcaagtgcgatgcagaccgcggtaaccagaacgcacaggcaggtcagcacgataatggccgggtactgataggccagccgcgtcagagagaacggctgctgccccaggttgatgtaggcgttggtgatggtgctgatctcggcgtgggtcaggctgtcgatgctcttgttcagcacagtgcgcagcagcacatcgtagtcctgccggacgccgatgcagaaattgcgctgctcgccgctcagcatcgagcgcagctcgttgcgcgtatcgtcaaagaccgtgcgctcggcctggtaggtgtaggtatagtaggcatcgacggtcccggcgcgcacggcagccaggcagtcatcaaaggaatccaggtattctacatgagccgtgtcgcccaggccgggcatttccagcgcggagggagaaaaatcgtatgcgacagcgacattgttcagcgtgccgttgtggcggcgcagcagcacccaggaaaactccgccgacagatagctgtcggtcagcttgtagccgtagttctccgcctgggacatgtcgtcggtcaggtcaatgacaaaatccgcctgcccgtccgccagcatggccttgtactcgctgcggtccgcgggcttcaggaatttgtagcgcagccgcgcccggcctgctgccttttggaaaatatccaccatgatgccggtgggcacgccgtcctgcgtcatgtaggagtaagggtagcggtccgggttgacaagcaccgtgaacaccgtgtctgcggcattgcaggcgatgacatagttttcctcggcgtcggtcaggtaaattttgctgctggtatggctgccggtgtagtatttgttgaacagtgtcgtgcgccagctggggtcgttgcggttgattttgctgatggcatcgttgaccagctgccgggtgacggtgtcatccttgcgcatggccatgtaaatgctctgctcgtcgaaggtgtcaatgatccattcgttcttcgtctcgcgcagccggttggagactgcagcggtgatctccccgttgcgcaatgcactggacagctcctcgtcggtgtcatagtacaccggggcgtagcggaaaccgtgctcctcggcgtaggctcgaaagctctcattgcggccactgccgctgcggctcatgccgacagttatgccgtcgaaggtgtcgtagtcgccggccacaatgctgcggttgccggctttgacggtcagcatcgtcgccactgtgccgatgggctcggcggaaaaggcaaactgctcgtcgcgctccgcggtccttcgcagcaccgggatcaggtcgatctgcccggcagccagctgctgcatggcctgctgggtgttgccgttcaggcaggagtatgcaaaggttacgttctcatactgggcaatgtcctgcagcagctcataggcgtagccgctgcggctgccgtctgcagcggtggccatgtagccggtgtaggggtagaagccgacgcgcagggtgcgcagggtggtccggccaccgtccgcggcatgcacgggcatggcaaagccaagcagaacgctgacggccaggctgaacaacagcagcatggctgccccgcgtctgcttacgccgggattctccttcttattcatcgaaaacagctccggtctttttagcgcggcagccgggcagggatgcagggcccgcggcgccgcacgtatattttgcaggcatggcccgggcagcttcggtgtcgtccgccgcgggcatcatctcggatgtttttacagctcccggatcgcggccagcacttcctcatgcgcggccaccaccggcggccaaaggctggcatcctccagcggcttcgggccgcggacggcgtcgcagagcgtggcggcggtcttatacaggcggtccatgccaaggttctgggccacgcccttcagcgtgtggctggcgcggaaggccagctcccagtcctgggcggccagcgcgtccttcagctggttgaagctggggtcgccggggtatttcagcacaaactttttgatgagtgcctcgctgggaagccggctgatggttgccttgtaatcgccgccgatgcggtcatagaattcctgcaatgtcataggggaccttcttctttcttacaatttatcggattcctgatttggctttggttcttctgcttcttctgcggaaaatgctgcggtgatacatttgttccggcactccttggcctgatacagcagcttgtccgcctgacggatgccggggtcaagggtgcaggcgccgtacacaccgccgatgctgaccgtcagatgcaggtcggggtattcgatcatgtgcagcgcctgcaccgtcgcgcggatctgctcaagccgctttataaagacatgctccgggatatgcgggaaaatcagcaaaaactcatcgccgccgtaccgcaccagtgcatcgctgcggttgcgcacgcaggccgttaccgcattcaccagaatgcgcagcgcgtcgtcgccggcctgatggccgtagacgtcattgatctgcttgaactggtcaaggtccagcatggctatggcatccacttccatgagcttccgcagctgcttctcaaagaagcggcggttataggcgttggtcaggacatcatggtagaggtcatgatggtagtcaaaaaactgctctacagggtcggcctgcccggcagcgccgatatacgcgggtacgctgtcatcgctccacagggagcacaggcgcacgtgatgccagcgaagctcgccgtcaacggacagcagcatcgaaagctcagtgtaagggtgttctgtgctggtggcgcgcagcgccttctggatgcgtgcaatatccgcaggggcgaacccggtttcctcgatttcatcgggcaggtgcagatctttgggcacgcccatgtgctccgccgcccacgccgagaaggaaagatgaccggtgggctcgtcatagtcaaactgtatgcagcggacgctctggttaaagaaccgccccttctgctgcaggcgggacagcgactgcgctatatgctcctgcccgggcagtgcgttctcccgcaggagggcatcggaaatatgctgtgcgtctgccagacggtgcagctggttgccggtgtccgaagcaatactcagctcggcatgcagctgcgcgccgcactcggtcaggcattccagcagcagcgggttgaactgcccgcactccccgttcaggatcatcttcaccgcggtatcgtggtcgaacgcttttttgtagcagcgctcgcttgtcaatgcgtcgtatacatcggccatagacacgacctgcgcggcgatggggatctgctcacctttaagcccgtccgggtagccgcgcccgtcccagcgctcatgatgccagcggcatatagcgtaggccgtcttgacaaggtcggactcctgccggaacggcagcttttccagaatctccgaaccaattgtggtgtgggttttcatgacctcgaattcttccttcgtcagcctgccgggcttgttcaggatggattcgggaatgttgatcttgccgatgtcatgcagcgccgaagcagtgctgatgagcgaaatatccgtggcggtcaggtggtatttgtcggttttctgcacaagcgtgtgcagcagaatatcggtggctgtctggatatgcagcacgtgcataccgctctccccgttgcggaactccacaatatggctcagtatgttgatcatcgtggagttgcttttctctttttcatagacctgctcggccacaaggcggaccagccgcttctgtttggcgtaaagcatcagggtattgatgacgcggcggcgcacgacggccatgtcaaacgggcggctgatgtagtcggtagcgcccagatcataggcacgctcgacgtagctggacgcattctccgccgaaatcatgatgacggggacttcgtcgatccagtggtatttgttcatcatggccagcacttcaaagccgtccatctcgggcatcataatatcgagcaaaagcaggtcgatgtccgtcgcggactgcaaaatggccacagcctgtctgccgttttccgcctccagcaactcataaccgtcacccagcatctccgtcaggatggcgcggttcatcgcggagtcgtccgcaatcaggattttctctttatcactcatgacttcacctataattacaagcggagcaaacgcgcggtaaaaatgtacattctccaatactttatcattatagtataatgggaaccggaaaaacaaccaatttgtgcaaaacaatcgaaaaatattccaaaaaagcaaaaagatgaaaaaatgtgccaaaaagaaaaagcctcccctgcgatgcagcgatagcgggtggtttgtagggagcggtcttgaccgctccgtgcccgccggtggcaccggaaaacaccccggggaggggtaaatcgctcccccgcgtagaacgtaggggccgggcatgcccggcccgcagccttgcggcaggcacaccgttcaaaggcagacgcgcaaggctgcgggccgcgacataaaaaggcaggtgctccacctgcgtgaagcatccgcctgaccccaaaattattttctctttctcttagcagccacggccccgaccatgctcaccgctgcggcggccagtgcggggtagagcaccagacaaaacgcctgataccacgtcggcacaaaatactgccatacggcgggcagggtgtcggcggcgttcagcgtgatgtcgctcattgtcagcgtcacggccttgttttcctcggggctgcaggggtccagccgcagcgcggccagacttgtgcgcggcagcgtgtagacgtactgcccgcttcccagactctgcgggaacacccggcggtccgcggagtaatcctcgccgaccttcgtcgtgtagtaaaggcacatttcccgcgcttcaccgtcaaattcggcggagtaagaaatcgtgcgcaccacgcggctgcccacgtcctccaaaatcatctgcgggtcgccgtcctgtgtcgtcagcgtgccgtccgcgccctgcacaaggcccaccagctgccagtcggtcacagccatcgtctcctcggccaaacggccctgcgcccgggcggcggcgtcactgccaaagtgtaccgcgcccagcaccagccagacggccagcgccagcagatacgccgtcagcggcagcgcgccgcggcgggagaaccagtttttcaaagccttcactgcgcgctcacctccatcggcatcggggcaaagcccgcatcggtcacgcgatacaaaagcgtctcgccgctctgcgccgccgccagcttgtcggtaaacaaatcggcgtagctctgcacaaaaatatcgtccagcgtctggatgtacagcaccgtgcagccgttgccgcgcacgatgtcgtccagctcctgcgccgtaaaggcgtggtagtaggtgtttttcacaccctcggcgggctgcaattcgggcagacccagctcgccgccgccgccgatcatctttgtctcgccggtgtcggggtcggtggtaacggtgccggaatagtctaccagaatcgggtagaagtcaaacacggcgctgaaccagccctcgccgttgtcgccctgaccgacataaaagacgcggtcatcgggggcaaggtagctgcacaccagctcggcctcggcgcgctcggcgcggcggtccgtgaactcgctgtcggcaaagcccagcacactcagctgcggcagaatcagctggctctggcggaacagcatcccgcaggccagcaccagcacaaacaactcaaaggcagcttgcggctgtcggcgagtcgcagcaaaaaccgctgtcgggccgtctgccccgcccttgactgtgatctgcggcagcagcgccaccgacagacaccccagcgccagaatgaaccagccgatgtaatagctgtaaatgtagcggttgtagtcggtcagctgctcggcctgaaaggtcttgaagataaagccgtagctcagcgccagcatgaggttgtagcccaaaaagcagacgccggacagcacgccgatgaccgcaatgcgcgccttgagccgccgcgatgctgccgccagaatcgccacggcaaacacgatggcgatcagcgcgaccacattgcggccctgcccgatcatgctcagcttgccgtcactcgtccagaactggtggcccatgtcggccatcgcagtgcggaactgggcctcgcgctcggcgtaaaagccctccaccggctgccccagcagaattttaatgccgttgaccacgacggcggacagcggggcgctcgtctcgccgacgccggaatcactggcgctgcggctgacgagccagccgacatagcgcacattccacagatagtaaattgccatcggcgcggcaaagcaggcaaggctgaacccggtgcgggggagcagaccggccttgaaatcgccgtcgtcggcaaacagccactcgtccacagccaccagcccagccgccaccagcgccaatacaaacgtattggccttgatgttggcagacagcgccagaatcggcagcacggcccacttgggggctgaattttggcgcagcgccagccacgcggccaccgcgccgccgaacacaagccccgcaggcacgtcgccgtagctggtcatgtaggtggtcgtcaggtagatcgtgtggttgtagttcgtgaagaagaacggcacgcaccacagcacagcggccatcggcacggccacgcgccatttttcccgcgggacagcccccacaacggcggcaaacacggaaaaatacaaaatgtcataaccgacgtaaattttccaatctgcataatcgccgaaaaactggaagaaatacgccagcagcggcaggccggggttctgggtcgcggcccagggtgtgcccagctcggcggtggcgtacaggctgtcgttgaccttcgtgatcttgaccgccgttgcccacaggctcagctcgtcaaagtccgtcgccataggctgccgcacgaaaaagtagaccgtgaacgccagcgccatgccccagaaaagcacgctgcccggggtgaaaaggcgctgcgccgcgccggtgctgcccctgcaggacgccgcgacccagacgccgcccgccagacagagaagatacagcagccacgcggcggggtagagaacgcctgccattgcggccagtgtcagcaccgcgacgatggcggacagtgccgtcagtggtgcgacggatgccgggacgcggcatttcagcgtcagcaccgcgcagccgcagaacagcgccgccaccgccgccagtacgcagagtagttccatagggtcagctccttgctgtgataaattgcgtgtaggggccgatgcttgcgtcggcccgcggggcgtcggggacgccgccccctacaaatgtgcaggaatgtaggggccgcacatgtgcggcccgcagctttcccgcaaaagcgattttgccttttggctgcgggccgggcatgcccggcccctactgcatttaaaatttcttcggttccttctttataaagaaggaacaaaccgcgctcgccattgccggcacaaacgccagcaccagccaccagcctgccgtcgggacaaagcgggtgtaccatgggcgcggggggttcagatcaatgccggtaaacagcgtcggcacgccgcccacgctgtccgggtcaatgcgcagccccgtgacccactgcccgcccaaatcaaacgtgtagacgccgggggccgtgaccttggcgtagaccttctgcgcctcgctgtagtcggtctggccgggcttcaaatagtacagcgccacgccgcccgggggcagccggtgcgccgcgtccagcacggcggtctcgatatacccctggccctgccagtaaatatgcgggtcgctgtcggtggaaagataccacgccgggtcgtcgtccggcggcgtccaccattcgttggacgaatagggcgcaaagctctcggtcaccagctcggcggcgtccacgtgcgtctgggacattttgccctgcagcttgtagttcagcatgacgccgcagccaacgagacaccgcaccacccagagcaccgccgccagcagatacgccagcaaaagcagctgccgcgccttcaaaagcggtttacgcatttactccaccccgctttctgccacagctgccagcgtgaacggcactgccgcgtccgcgccctcaaaatgatagagcgttgcgggcatgtcgttggtcaatccgccctcaaacagggggctgaactcccgctgcagatagtcgtccgcgcggtcgatcaggatataatcgcagtccttctcggccatgtaggcgaccagcgtgtccggcacgcagacggccttgtagtcgtagagcgtccagttttcgctctcgaccagattcataaaatcgctgtcccagcggtcctgcgtctcgcccaggcggccatagaagccgccaaagccgttcacgacctgcgcggtcagctcgtaccgataataataccatcgcgtggcgtcgtcgccctggctgatgaccagcacgcggtccggccagcccagcacggtgttcatcgtatcagcgcggttctgcacgtcggcgcgcagcgtgtacaggctgtcggcaccggaccagaagcccgccgcgggcacaccgcgccagcagaatacggcaaaaatcaccgccgccgcgccgcccgtcgccagctgcgccagccgctcccgcgcgccgcgcgccagcagacagagcattgccagcatccacgcctgatagtagggggccagatagcggtcatagtccttgagcgccagtccctccaggtcggagaagttgtagttgtacagaatcagatggaacagatacagcgccgcaaagcagaacgcaaaccccagatgcgcggccagcacgcggcggcgcggtgcgcccctgtcagcggccagccatgccgcggcggcgaccatcgtaatggcagccacagccatgatgccgccgcccaaaaggcagatgcgccgcgtaaagaacgcgctgcccatggcggccatgatctgcgcgaacttttcggtgcggcccatgcccagcagctgctttacgccgccgaccaataccgcgccgtagctcaagccctcactgccgacgctcgcggcggtgtccgccgtgggggtgacagccgccgtgtagcggccccagcttgaaaacgccgccagcacgataacagccagtgcacccgcccggagcagagccttggggaacgcctttctgcagggctcgtctgcggccagccacagatccagcccgatcaggaatgccgcgatcagcccgtaggcaaagcagatgtccttggtcagcgtcagcacggccagcggcagcacaacaagccaataggcaattttgcggcgtcccaccgcgaaatacaggcagagcgtgccgccgaacagcatcgccagcggcaggtcggccatggcgttgacgtactgcgctgcgtagctgcccgtaggcgtggccgagaagaaaaacggcagcaggaaccccgccgcaaacacgagcacgccgcccgcccagcgctcccgcggcagggcggacgcagcggccagacaggccagcgccagcgtgtcaatggcggccagacaggcccactcggcccaagggccgaagggctggaacaaaaatgtgatcagactcgttgccgggtaggtgaaagacgccttcaggttgaccgggtcagccacatagaatgcgccgcgctccacgaccatcttgggggccaggccccacgccgtgaactcatcccactgggtaaacatcggctgctgtacacagaacagcagccagataaacgcagcaccgcctaaaaacagcgtgaaaccggggacggaggccgctcttttccaggcagcggccaccccggcggggcggtgttgcacaagcccgacgacccacacggcggccagcgccagcagtacagccacggcgccaacgcgcaggaaacccgcgaccccgcagagatacagcacgaccaccgcgccgctcaaaataggcagcggcagcaaggcgggggagagattggatttttcgcccagtatcgcacaagcgccggacagcaaaagcaaaagcgcaagggcgtagagtagatgcagcatgaaggggcctcctttcttcaaataataaataaaaaataataaataataaagaaggtggagtttgcgcctttggggcgcaaacaaaaacgtaggggcgcattctatatgcgcccgcaaagcctgcgccgccgtatacatcccgggcggatatggaatccgcccctacggctgttttgagcggagcgccagcgacgcggtccaccacatttattatttcttatttattattttttatttgcaaatcgttacttataaatcgtatacaccggtcccacaaagtaatgctggaacaaaagcacggccccggcaaacgcataccagccgcacagcgttaccgccagcgcctcgcccttggccgcggtcagccgcggggccagcacccgccgcagcacagccgccgcggccagcaccagcagcagccagaccggcaggaaataccgcgtctgcaagccgacgatgcgcaccatgcccaccggcgtgtaggtgatgtacatggcggtcatcgcgcccacggcgtagaccaggccgaacacgcccagccagcccatgcggcgtcggcccagcgtgtcggtctgcgcggtgcagagcatcgccgccgccagcagcaccggcggtgcggtgatgctgataaacgcaatcggcatatccttccagccgaacagtcccagctggccgaggaacccgtcgttctcatacagtgtgcccagcaaaaccgcgatgtaacgcagcggatttttcaaaacaaacagcagctgcgcaccgccgttcacggtggtgccgccctggcgggcaatcgcgccgtagttgtggcgcaaaagcgtgccgtactgctccacaccgagggtcagcgccagtgcacctgcagcggtcagtacggcgtacacggcgcggctgaaacgcaccttccactcggatttccgtaaaatcagcggcagcacgacccacagcagattgatatacggcttggtgccgttggcaaacacgcaggccagcgcataaaaaagcgccgtcttatcgttccattcgtcccgcgtcagcagggccagcatgacgtaatagcagcccaaaagcgtcgcgtcgtagctcagcgacgcacccatgtagagcgacatcggcataagcataatgcacaaaaacgcaggtctgcatttgtgcgcactgcgcagcgctgcatagcacagcgccgtgtaggccagcaggttcacgagccgcccgccgtacaggcagcccagtgcgccaagcccaaacagccgcgccagtgccatgcccagcgcgccgggcaaaaacggcaaaatcagaaagctgaccggctcggttacgcgctgcggcacagagtccctatacaaccaggtaagatactgttcaaaactgtcccggatgctctccacccggccatccttgccgtactgcttcagcgcgtacccggcggagttgaacggctgctcggcgtgggtgtcggggtcggtgcccagccctgccgaggtgtgcgcgttgacccacgcgccggggaacgccgcaacaagctcgtccacgtcctcggggtagccacgctgggcatcaaaatcgaaccggcccatggatatagcgtaggtgcgaagataatggtcggtctcgtcgggggtctgcatcggcgggttggcaaaggcaaacagcacgccgcacagcagaatgcacgccgcgccctttttggcaaagtccctgacccgccgcagcgccagcgccgccgcaccggccagcacggccagccccacgcaaaggccggtcacacccgccgcagatacgccgcgggcgtccagcccgtagaacacgcgccagtagtagctgacgacgacgcccagcgaggcgcagaccgccaacacgaaagcccaccgggcggcgggctgctgcacggtgggtagggacaacttctttttggaaacgtttgacataaaatcagattcctgtaggggcgaggcatgcctcgcccggctgttcgccgcgccgcaaggtatccggcttggcaaggtcgggggccgggcgtacccggcccctacagtgcatgaaaaatctgcgatgttacagaatatactgcccgaccttgtactgatccaggttgccgcgcaggaactcgatggtcgcagccaggccctgctcaaaggtgtactggggcgcccagccggtcagctcacgcagcttggtggaatcgcccagcaggcggttgacctcgctcttttcggggcgcagacgctcggcctcgcagacgatcttggcgttcgggttgatctgggcgatcagctcgttggccagatcgccgatggaatgctcaacgcccgtcgcaatgttcagctcctggccaatcgcggcgtcgcagtcggcaatcgtcataaagccgttggccgtgtccttgacatagttgaagtcgcgggtcggggtcaggctgccgagcttgatctcggtctgaccggccagcagctgggtgatgatggtcgggataatggcgcgtccgctctggcgcgggccgtaggtgttgaacgggcgcacgatggtgacgggcaggtcaaagctgcggtagaagctctcggccaggcggtccgcgccgatcttggtggcggagtacgggctttgcccctgataggggtgcttctcgtcgatgggcacgtactgcgccgtgccgtagacctcgctggtggaggtgacgagcacgcgctgggtgtccagctcacgcgcggcgttcagcacattcagcgtgcccttgatgttggtgtccacatagctgtccgggctgtggtaggagaaggggatcgcgatgagcgcggccagatggaacacgcgctcctgcccgcgcatggcggtgcgcacgccgttggggtcgcgcacgtcgcccatgaagatgtcgatttcgctgcggatctccggcggcagggtgtcgatccagcccagcgagccaaaggaattgtacagacagaacgcgcggaccttttcgccgcgcttgacgagttcttcggtcaggtggctgccaataaagccgtctgcgccggtgaccataacggtgtgtgccattgcttgctcctttttaaaaaggggacaatgccccatatttcaactttattacaaaacagtataaccgatttcggggaagatttcaactgtaagttatgaatagtgaatgggcggctgcacgaacgcggccctcatccgtcagcggccccgtccgctgacggatgagggcaaacctcgccttacagcccgtttacagtttttgcaaaaaatccctattttcctattgacatacggttaattccgtgttatcatacagtcaacctacaaatcacataggtttattacaaaaaagcaaggaggtgcaaagtatatggctcatgttttcggtgatctgctgcgtcagaatttccgctgtggccgaatgcctaactcccgggcaaatgcagtccgggcgcggggcgatgctttgcactgcctgtaaaaccggcgccgcactgcatattctgcccgggagttgtaccaaaacgacccccggcttttcttttacaaaaaacagaacaaaaaacagaaaaaaacagaaatgaggattttatcatgagcgcgcgtaaactgcattttgagacccttcagctgcacgtcggccaggagcaggccgatcccgtcaccgattcccgtgcggtgcccatctaccagaccacttcctatgttttccataacgcccagcacgccgcagaccgctttggcctgaaggacgccggcaacatctatggccgactgaccaacaccaccgaggatgtctttgagaagcgcattgccgcgctcgagggcggtgtcgccgcgctggcagtggcctccggcgcagctgccatcaactacaccatccaggctctggcccagaacggcggccacatcgtcgcccagaaaaccatctacggcggcacctccaacctgctggagcacaccctgcccgccttcggcgtcaagacgaccttcgtcgatgcccacaacctggctgaggtcgagggtgccattcaggagaacacccgcgccgtctatctggagacgctgggcaaccctaactccgacattcccgacatcgacgccatcgctgaaattgcccacaagcacggcattccgctggtcatcgacaacaccttcggcacgccgtacctgatccgccccatcgagcacggcgcggacatcgtggtccattccgccactaagttcatcggcggccacggcaccacgctgggcggcgttatcgttgactccggcaagtttgactggaaggccagcggcaagttccccgccttctcggagccgaaccccagctaccacggcgtcagctttgtggacgctgcaggccctgcggcgtttgttacctacatccgcgccatcatcctgcgtgacaccggcgcgtgcatcagcccgttcaacgccttcctgctgctgcagggcaccgagaccctctccctgcgtctggaccgccacgtcgagaacaccaagaaggtcgttgagttcctgacccaccaccccaaggtggagaaggtcaaccatcccagcctgcccgaccaccccgaccacgccctgtatgagaagtatttccccaacggcggcgcgtccatctttaccttcaacatcaagggcggccagaaggaagcctttgcgttcatcgaccacctgcagatcttctctctgctggccaacgtcgctgatgtgaagagcctggtcatccacccggccaccaccacccatgcccagctctcccccgaggagctggccgacgtcggcattcaggagaacacgatccgcctgtctatcggcaccgagcacgtcgacgacatcatcgctgatctggcacaggctcttgacgctgtcgagtaatttgtaaagacttttagagggaacagggattatatagaacaccgccgcccgtgggttgcaagccccatgggcggcgggttttgtttacgtagagagccttccccctagggggaaggtgtctgcggctctgcccgcagacggatgaggggcgacctgccgcaattgcccgtttacggatagttcccccacatacccgcccctcatccggcactgcggggccaccttccccctagggggaaggcttggggcttgcactgcgtcaatgtttgttgtatcatttatatacaaattctcccacaaaggagctatccccatgccccatatcatcgaaattacagatttatccgcccccgagctggctccttacaccaggctcaccgaggcccagctgcgcaataagctggagcccgaaaagggtatcttcatcgccgaaagccccaaggtcatcggcacggcgctggacgccgggtgcgaaccgctctcctttttgatggaacgccgccagatcgacggccccgccgcgggcgtgctggcccgctgccccgacgccgccgtctacaccgcggaccgcagtgtgctgcaggccctgaccggctacgcgttgacccggggtgtgctctgcgccatgcgccgtccgcagccgcgcagcgtcgaggcgctgtgcagagacgcccgccgcgtcgcggtgctggaaggtatcgtcgattccaccaacatcggggccatcttccgcggggccgccgcactgggcatggacgcggtgctgctctcgccgtcctgctgcgacccgctctgccgccgtgccgtccgcgtcagcatgggcacggtgttccaggtgccgtgggcaacgctgggtgacagccctgccgactggcccgaggccgggatggcccgcctgcacgcgctcggctttaaaactgccgccatggcgctggacagccgcgccgtcagcatcgatgaccccgcgctgcgcgccgagccgcgccttgccatcgtgctgggcacagagggcgacggcctggcccgcaccacgattgcccactgtgactacaccgtcatgatccccatgcagcacggcgtagactcactgaacgtggccgcggcaggggccgtggcgttctgggagctgcgggcaagataaaaaaatagagaacatcgtaggggcggattctatatgcgcccgtgccgcgctgactttagcacaattccacgggcgcatatggaatccgcccctacgggtatttcccggcagtgtgctgcaccgcaaacttcctccgtcaatctgccacaaaaacattacaaaacttttacgccctgctgaccgaaacgtcggcggggcttgttgtttttgacggagcaaaatgttacaataattatacaagcacgcaaaatgcgtgcaataacaaatgcggaggttttcttccatgggcttcctgaaaaaattcaccaagcaggagatcagctggatgatgtacgactgggccaacagcgcccactcggtcatcgtcgtgaccatcctgcccatcttctttgacaccgttgcgggctacaccgccgacagcgtgtccagcatgtccacctggggctttgccaccagcctggctatggccatcgtcgccctcagcgcgccgttcctgggcgtgttcggcgacatccgcggtatgcgcaaaaagctgttcacggcatttatgctcatcggtgttgtctcggtagcagggctttccttcacgccgttcatggacttcaccgcctcgccggatgcggcgggcagggtcgcggcgatagtgctggtgctctacatcacaagcaccatcggctttgatgcgtcctgcatctactacgacgctttcctgaccgacgtcacgacggaggaccgcatggactcggtctcgacgctgggctacggcctcggctacatcggcggctcgacgatccccttgctgatcttcctcatcatgaacgccgtcggcgtgccgatgctgacctgcctcgggttcatctttggcctgaccgccgtgtggtggctcgtgttcagtgtcccgctggtcaaaaactgtgagcagacctccggcaagccctataagaagggcgatgtgggggccagcattaaaaacgtgttcacgaccatgaaggagatcggcgcggataagcccatgctgatctacattatatcgtactttttctacatcgacggtgtgcataccatcatcagcatgtctacaagctacggcaccaacctggggctggactccgccggtatgctgctggcgctgctgctggtgcaggtgctgggcctgccgttctgcctgctctacatgaagctggccgagaagttcggcgcgcgcacgatggtcggcgtcggcatctgcgtctacatgtttatctgcgtatttgcgttctttatgaacagcctatggcagttctggatgctggccgtgctctgcgccaccagccagggcggcattcaggcgctgtcccgctcgatgttcggcaagctcattcccgacaagtcccgcagcggcgagttcttcggcttctttgacatcttcggcaagttctcgtccatcatgggcccggcgctcgtcggctttgtcagtgcctttaccgccaacaaaatgctggccgaccagggtctgaccgccgccacagccaccgccgagcaggtcgatgccatcaatgccgccgccggaccgttcggcattttgtccgtcatcctcatcatcattgtcggtgccgcgctgtactttggcgtgctgccgaaagttatgacgaatgacgagaggaagatttgaagcagaatgccttcccccttgggggaaggtggccgaggccccgcccgaggtcggatgaggggcgagttgccggatattgcccgtaagcgggaaataccgtaagctctgccctcatcagtccgctgcgcggacagcttccccctcgggggaagcctttttgaaaatttgactttttcccttccacgcagtacaattatacctacgctgatacgaaaggggaccctacatgccggaaggctatacccatgtgcgcaccgcaagaaaagctgcggaaaccatccactacaaaattcagtgcccggcggcgtttgcggcgggtgccaacggcccggacagctttttctgctttgaaatctggaaaaagcgcgccaagcgccgctatgacctgcccggcctcggcaaccgtatgcacgaggaaaagaccggcgcattcctgcgcagtctttgcgccaacgtcaagacccgcccgcaggtcgagtacacgctcggctttttgagccactacgccgcggataccgttgtgcatccgttcatctgtgccatgtgcgcgcccggccagccctacgcgggcaagggcgggcacggctatctcgagatcgcgctcgactcgacgctccacgccgaggacaccggctctgcgctggttcctgtcgatgacgtcagccccctgcccacaggggaggagctggccgacatcacggcgctgctgcacacctgtctgctggaaacctacggcgaggagatccccgtggagtacctggccgatgcgttctggcacacctacaggctgcgcgggctgttccccagtaagcacggcttgcgccgggtgtttttctggctcgtggagccgctgttcggcgggcgcggcttcatcacgggccacgtctcgccgcggcagctggacaagcgcctgcccgacgactggaccgacccgtttaccggcgagcatcacgacggcggcctgtttgcgctgctgccaaaggcggtttttcgcagtgagcagttcatgggtgcggcgctgctgtactggatgaaccggctgccccccgcagaatttgccgaaaagctcggcagtatgagctatctgcagggcatcgccacccccgagagcgaccctgacacaacaaatctaaccgaaaaggagaacaccgtatgattcgcattaccatgcagaacggcaagactatcgacattgagctggaccacagcgcagcccccatcacctgcgagaactttgagaagctcgtcaaggacggcttttacaacggcctgaccttccaccgcatcattcccggcttcatgatccagggcggtgacccgcagggcaccggcatgggcggccccggctggcacatcaagggcgagttcctgcagaacggcgttgccaaccccatcaagcacacccgcggcgtcatcagcatggcccgctcgatggacccgaactccgccggcagccagttcttcatcatgcaccaggatgccccgcatctggacggcagctacgctgcctttggccatgttgtgaacggcattgaggtcgtcgatgagatcgccaacgttgccaccgactggaacgacaagccccgcacgccggttgtcatggaaaaggtcgagatcgtctgacagcaataaagagagctatgcccacgggcatagctcctttttaattataaggcttcccccacgggggaaggcgtttgatttcaaatcacataatcattccccggttggctggtgttcaccaggtccgccagagtgatgccgtcgaagtagtcgttgatcatcgtattcagcttgcgccacatcggcagggtgcggcactcggccatgcggcggcactccacggggttctgctccaggcaggccaccggggccaggctgccctcgctcaggcgcaggatgctgccgacggtgtactcctcgggcgttttggtcaggcggtagccgccggacttgccccgcagcccggtcaggtagcgctccttgacaaggctcttcacgatggcctccagatacttttcggaaatttcctgccgtgcggcgatctccttcagggggatatagccgtcgtgctggtgctcggcaatatcgatcataacacgcagcgcataacggcccttcgttgaaatcatcatagtggtatgctccttactgttcttataacctattatacaggttggtaaataggatggcaacacctttttgcaaaataattttggaaaattccctattaccctattgacaaacgggaaaatatgttgtacaatcctatcaacctacaagaaaggtatgaattgatatgcgaaagggatttgtgccatacgcgcgatgtcgtcgtcatgagctgtaaaaccgcgaccgatttacaaataaacagaaatgacgatggaggaaactaccatgagcaagatttatacttccgcagaccagctgatcggccacaccccgctgctggaactcacccatattgaaaacgccgagaaccttgaagcaaaaattctcgctaagctggaatatttcaaccccgccggctccgtcaaggaccgtatcgccagggccatgatcgacgacgccgaggccaccggcaagctgaagcccggctccgtcattatcgagccgacctccggcaacaccggtatcggtctggcgtccgtcgccgccgcccgcggctaccgcatcatcatcgtcatgcccgagacgatgagcgtcgagcgccgccagctgatgaaggcctacggcgccgagctggtgctgaccgacggtgccaagggcatgaagggcgccattgtcaaggccgacgagctggcgaaggagatccccaacagctttgtgcccggccagtttgtaaacccggccaaccccgacgcccacaagcgcaccaccggccccgagatctgggaggacaccgacggcaaggtcgacatcttcgtggccggtgtcggtacgggcggcactgtgaccggtgtcggcgagtacctgaagagccggaaccccaacgtcaaggtcgtggccgttgagccggcttcctcccctgtgctgagcaagggcactgcgggtgcgcacaagattcagggcatcggtgccggttttgtgcccgacgttctgaacaccaaggtctacgacgagatcatccccgtcaccaacgaggacgcctttgccaccggcaagcaggtcggccacaaggagggcgtgctggtcggcatctcctccggcgctgcgatctgggccgccatccagctggccaagcgccccgagaacaagggcaagaccatcgtggccctgctgcccgacaccggtgaccgctatctgtccaccccgctgttcgcggactgattgcaataacaggaaacctttgctataataaaggtactgttgcatacgaagtgaaggccgtaggggccggacatgtccggcccgcagctttcccggcaatgccctgataaggcgaggccgcgggcgaggcatgcctcgcccctacaactcaaaagcaaaaatgtgcagcacgaaagaaccgtgctgcatatttttttaaccaaggaggcccctatgtcaaatacccccggcgcgttgatcgccatgagcggcggcgtggacagcaccgtcgccgcctacctgatgaagcaggcgggctgccgctgcatgggcgcgaccatgcgcctgtaccagaatgaggatctgggccagagcgggttccacacctgctgctcggcgaaggacgtcgaggacgccgccgaggtcgcgttccagctcgacatcccgtttgaggtcgtgaactacaccgaggaattccgtgaaaaggtcattgccaagttcatcgagacttatgaggcgggcggcacgccgaacccctgtatcgactgcaaccgcacgatgaaatttgacaaaatgctggactttgcccgggagcacggcctggactatgtggtcacaggccactacgcccgcatcgagcaggaccccgccacgggccgctggctgctaaaaaaagcactgtacaccgataaagaccagagctatgtgctctacgttctgacccaggaccagctggcgcacacgaagttcccgctgggcggcatggacaaaccgtccatccgcaagatcgccgaggagcagggcttctgcaacgcgcgcaagcacgacagccaagacatctgctttgtgcccgacggcgactacgtcggttttatggagcgctacaccggcaaatattacccggacggcgactttttggacgtgaatggcaacgttgtgggccgccaccacggcgcggtgcgctacacctgcggccagcgcaaggggctggggctggcgttgggcgcgccggtctacgtctgcggcaaggatatggagaagaacaccgtcaccgtcggccccgagagcgagctgttcaagacgacgctgatcgcaggggacttcaactggatttcggttcccgagttgaccgccccgatgcgcgtcaaggccaaagcccgctaccgccaggtcgagcagcccgcgacggcctacccgctggaaaacggccttgtgaaggtcgtttttgacgagccccagcgcgccattacccgcggccaggctgtggtgctgtatgacggcgacgtggtcgtcggcgggggaacgatactatagataatagataaaaaataataaataataaatatggtggagttttcgccccgcggggcgaaaacaaaaatacggtgcagctgcgattttgcagctgcaccgttgtttttatagaattacagcttctccagcgccgccttcacgcgcttaacggtctcctctttccccatcatcgcggccaggtcggtgccgccgcccggggtgcgggacttgccggagagggcgatgcccagcgggaacagcagccagccgttcttcttctccatgctctcggccagcgtcttgcacgcctcaaagatcgcgtcgcgggtccaatcggtctgcgcctccagcacgggcagcagggcggtcagggcctccttcgcggactcgggggtcgttttctgcttcttgttgcggtacatctcagcgtcaatgggcagcacggcgtcaaagaagtcgagctgcggcgggatgtcctccagcacctcgcagcggggctgcaggttggcgcagagcaggtcacggtcaatgctgcagtgcacggcgctgtcgatgaacgggtcggccagacggcggaactcctcagcgggcagggcacggatgtaggcagcgttgatggcacgcagcttcagcgggtcaaagatggccggggacttggaaatgcgggacggatcccagatcttgatcatctcgtccagagagaaaatctcctgctcgccctcgggtgcccagcccagcagcagcagatagttcagcacggcggcgggcagatagcctttcgccacgaggtcctgatagctggcatcgccgttgcgcttcgacagcttgttctgcgcgtccttcatgacgggtgggcagtggatgtagacgggcttctcccagccgaacgcatcgtacagcaggttgtacttcggcgtcgaggacagatactcgctgccgcggatgacatgggtaatgcccatcaggtggtcgtccacgacgttcgcaaagttgtaggtcggcataccgtcggtcttgatcaaaatctggtcgtccagctccctgacatcgacctcgatatgaccgtagacaacatcgtcaaagcccgccacgccgctctcggggatcttctggcggatgacataaggctcgcccgcggccagcttggcggcaacttcctcggcggacaggtggcggcagtggccgtcgtagtgggtcatttcgcccgcagcgcgctgggcctcgtgcatttcgttcaggcgctcctcggtgcagaagcagtagtaggccttgcccgccttgacaagctgctcggcgtactgcttgaacatacccatgcgctggctctgcacgtaggggccgacgggaccgcccacgtcggggccctcgtcccaggtcaggccggtagccttgagcgtgccgtagatgatgtcggtagcgccctcgaccaggcggccctggtcggtgtcctcaatgcgcaggatgaaggtaccgccgttatggcgggcctgcagataggtgtacagtgcggtgcgcagattgcctacatgcat

SEQ ID NO: 1168 - DNA, 10049 bp, unidentified
  source 1..10049: mol_type = unassigned DNA
ttaaagtgctttctttatcgctgccatcagttcgtcatatgtctcaaatgccaaaaggtctggattttcatttttgattgcatcagtacttcgaaataaaaatcccgctttgctcgcacgaatcattccaagatcattatagctgtcaccgcttgcgattgtctcaaaaccaatagactgcagtgcctttaccgttgtcagcttagactgctcaattctcatcttaaaacctgtaatttctccatcctctgcgacctcaagcgtgttgcaaaatattgttggccacccaagctttttcataagcggtgctgcaaactgtgtaaacgtatcactgataatgattacctgtgtcatgcttcttaactcatcaagaaattccttagcaccaggcattggatcgatctgtgctatagtctgctgaatctcctttaagccaagaccatgttcctttaagatgcccagtctccacttcatcagcttatcataatctggctcatcccttgttgttcttttcagttctgggatgttgcttgccttagcaaatgcaatccagatctccggtaccaatacaccttctaaatccaaacatacaatattcattgtgttctcctgcctttctcaatttatttattttctactcctctacctcaatgtcaagtccaagctccttcggcagaaaacgcggacatacattgtctgttgtaatgataacagatgcagcaagacgtgtaccgatttcaactgcttcctttaattctttgccatatgtcatgccaatggcaacacctgcaaagaaggcatctcctgctcctgttgtatcgcgcactactaccttgcgcgccggataaatacctttatttcccttacagtctgcatacacggcgccttcaccgcccatcgtaacaacaattgatggaatcttagcgctcacaacatttgctgaaataatatcgcaaagttcctgcggtgtctttccctcatagtcctctgcaaagaaaatgcctgcctcaatctgattgcatacaaagcagtcaaaatgctttaagtaatcacgtcgttccacggcaatgctcatatttgtgacaacaccatacaccctcttattatacttttgtgcaagctggaatgtcttttttatgatttccttatcaatgtccatttccagtacgatggaatctgccttagagatgatctcatctcccttttcctcaagagtatacaaaatcggatacaagtttggtctttgtgagatagaccctgccaaatcacccttgttgtcaaatacagccagccatgttcccattccacccggaacactcttcacatagcttgtatctaccttatgtctttttaatttgcgtacaacatcttcgccaagcgcagatgtatctacgatgcttacatatgtaggcctaagctcaacatttgcaatgtcctccacgacatttcgcgttacgcctccgtgtatgtattcaatccgtcccgcattgcggccctccggcacatatatatcctcaggaaagcctttgatatccacaaatacggcgccgattactacaattcccatggtttgtcccccagtatattacaatcttggagccatcggcagctgccggtgactcctaccctttattgtacaaaacattccacaaaaagcaagcatcattttagttttgtccattgctttttttacataatatagtagaatataactatctcaaaaacttgacgagaataaaaaggaaggttggtattacatatgaaattttttgaaataaaagatggtgcgcttttctttaagcgccgccaggaaattatggaaatttgtccatggggtgccggacttcgtgttcgagctacacaaaatcgaagcttttctgataaggattgggcactcgatgttcctgcaaaggcagacggaaaaattgagctttttgacgatcatgcaatcgtgagaaatggcagtatctacgctgttgttacagactttggacgtatcagtttctataatgaaaaggatgaacttttactaaaggaatattatcgcagctgggattatggaacaaaggattggaaggatcttgatacaatcattatgcagcgtgctgctgcaagaacctaccgtgctgttggaggcgacaactatgcattaagtgtacgttttgaggcagatgataacgaaaaactctttggcatgggccaatatcagcagccacagtttgatttaaagggctgtacacttgagcttgctcagaaaaatactcaggcaagtgttccttatcttgtatctagcaagggctatggtcttttgtggaataatcctgcaattggacgcgcaacgcttggtgctaacgtaacagagtttactgctgaatctacacgccaaattgattactggattaatgcagccgatacacctgcagcacttgtagagcaatacacagagcttaccggacgtgtcccgatgatgccaaaatgggctatgggcttttggcagtgtaagcttcgctatcagacacaagatgaagtattaactattgcgcgcagatataaggaattaaatattccgctgtctgttattgttatcgacttcttccactggacacagcagggcgactggcgctttgacccggaatatttcccagatccaaaggcaatgatcgatgaacttcatgagatgggtgttcgcgtaatgatttccatctggccgactgttgaccgtacaagcgttaactatgaggaaatgagtgagcgtgatcttttaatccgtacagaccgcggcttaaatgttacaatggaatgctggggaatgcagtgcttcattgaccctacaaatcctgaaacacgtgaatttgtatggcaaaaggcaatggaaaattaccgctcacacggtgttgatctgttctggttagatgaagcagagccagagtacactgttcaagactttgatctttaccgctactatgatggtccggcattagagtgtgcaaatgagtatccagctcgctattctcagaccttctttgacggtatgaagaaggaaggaattgaaaaccctctgaatcttgttcgctgtgcatgggctggttcccagcgctatggtgcacttgtctggtccggtgacgttccttctacatttacttatcttcgctatcagctgacagctggcctaaacatgggtcttgccggaattgcatggtggacagcagatatcggcggcttccatggcggaaatgtacatgatccagccttccatgagcttttgatgcgctggttccagtttggtgcattctgccctgttatgcgtctgcacggcgaccgtgatcctcactacaagccacttggcacaacaggcggcggtaaggttgcttctggtgccgacaatgaaatctggagctacacacctgagattcaggatatgatgagttactatatcctgcttcgtgaatccatgaagggttatatgacaactgttatggaagaagctcatgaaaagggaacacctgttatgaagccgctgttctacgattatccggcagacaaaacttgctgggaaattgcagacgaatttctctttggtcatgatcttcttgttgctccagttctttatgctggtgagcgcacacgtactttgtatctgccagagggacgctggtgtgaatatgagacaggtaaggtttatgatggcggctgcacaattactgtggatgctccgcttaaccgcgttccattattcgtaaaagaaggcaagacagtttttgtgaaataactatataaggatttttaaatgaaaaaagaaggctactattcttctggacagttcgcagggatggctcatgtcaccctgcggaccatccgctattatgacaagcagggtattttaaagccctcttttgtaaatgaatctggtgcacgcttttacactgatgaagattttgcgcgtctccagcaaattttattattaaaatatcttggcttctcacttgatgatattcgtgaaatgatcgtagacacaaaagatcttcactacatgcaaaattcccttaacatacaattaaatcttgtgcgcgaccgcattgagcaaatgcagcttgtagaaaaagcgatccttgaaacatcagatgccataaacaagcagcacagcattgactggaaccgcatgttaaatttgattcatctgactggcatggaggaaagcttaaaaaagcagtatcaaaatgcctcgaatatctctgcccgcatcaatcttcaccgcctttattcccaaaataaacagggatggtttccatggattctggaaaactgccatctggcgccaggaatgaatattttggaaactggctgcggtgacggcacgctctggtgtgaggcaaagaaacagttttcccagaataattgtccagatcacaccaaagctcatgatcagcagccagatcttcttaaaacttgctcaattatgctgactgatatctcagagggaatgcttcgtgatgcaagacgtgcaataggcgatggcgatgaattttcatttcgtgaatgcttctgtgaggcacttccgtttgcagatgaatcatttgaccttgttttggcaaaccatgttcttttttactgcagtgatgtgacacaggcgtgccgcgaggccgctagagtattaaagcccggcggacgattcttatgcagcacatatggtgcagaccacatgaaagaaatcagtcgtctcgtgtctgactttgactcgcgcattgtactgtcggcagattgtctttacgagcgattcgggcgcgaaaatggagccgagattctagcgccatattttagtgatgtgaaatggctctcctacgaagactcacttctcgttccagatgccgaaccgctgattctctatattctctcctgccacggcaaccagaatcaatatttgcttgaccactttgcagaatttcgaagcttcgtcaagaaaaaaacagatgctagattctcggtcacaaaggatgctggagtgttttgctgcacgaaatagctgccgttgagccacttgtatttgtgcacttttcacaaactttgattttcccacaaaaagcgcttgaaggtgacgtaacgtcaccttatatactatgcgtgtcaaagaaaaaatgttttgacacgcgacatcatgtatatacgaaatttgattttatttttgaaccactagggacagataaaaagccatcatccctgtccccattagaaaggagtttattatgaccattatcgttaccggcggagccggatttatcggaagcaactttattttccatatgttaaatacttacccggattaccgcattgtatgtttagactgcctgacctacgctggaaatctttccactctggcaccggttatggacaacccgaatttccgttttgttaaggaaagcatcactgaccgtgaggctgtttacaaactgtttgaggaggagcacccagacatcgttgttaacttcgcagctgagagtcatgttgaccgttccatcgagaatccggaagttttcttaaacaccaacattcttggaactgcagttttgatggatgcttgccgcaagtatggcattcagcgttatcatcaggtttccactgatgaggtttacggtgatctgccgcttgaccgcccagacctgttcttcactgaggagactccaatccacacaagcagcccgtacagctcttctaaggctggcgctgacttattagttcttgcttatcacagaacctatggtctgcctgttaccatcagccgctgctcaaataactacggtccatatcacttcccggagaagctgattccgcttatgatcgctaacgcattaaacgacaagccgcttccagtttatggtactggtgagaatgttcgtgactggctgtatgttgaggatcactgccgtgcaatcgatctgatcatccacaagggacgcgttggtgaggtttacaacgttggtggacacaacgagatgaagaacatcgacatcgttaagatcatctgcaaggagcttggaaagccagagagcttgatcactttcgtaggcgaccgtaagggacatgacatgcgttatgcaatcgacccgaccaagatccacaatgagttaggctggctgccagagactaagtttgctgacggtatcaagaagaccattcagtggtacttagacaataaggagtggtgggagaccatcatctctggtgagtatcagaactactacgagaagatgtacgcaaaccgctaatggaggtcgttatgaaagtatttgttactggagttgccggtcagctcggacatgatgtaatgaatgaactggctaagcgcggctatgagggaatcggaactgatattgcaccagagtattctggcgctgctgacggtactgctgttgtttctatgccatatgtttctttagatatcactgatgctgatgctgttgatcgtgttatctgcgagatgaagccggatgttgtcgttcactgcgctgcatggacagctgttgatctggctgaggatgaggacaaaaaggataaggtgcacgcaatcaatgcggatggtactgcaaacatcgcaaaggcctgcaagaagactggcagcaagatggtttacatcagcaccgactatgtatttgacggtcagggtactactccatggacaccagattgcaaggattataagccacttaatgtttatggtcagtctaagcttgacggtgagcttgctgtttcgagtactcttgacaactactttattgttcgtattgcatgggtatttggcaagaacggaaagaacttcatcaagacaatgttaaatgttgccaagacacacagtaccttaaaggtagttaatgaccagatcggtacaccgacatacacctttgatttggcaagactgcttgtagatatgattgagaccgacaaatacggctactatcatgtaacaaatgagggcggctacatcagctggtatgatttcacaaaggaaatcttccgtcaggctacccttcttggacgcactgagtacagtgaggataatgttactgttcttcctgttactactgctgagtatggtctttcaaaggctgcaagaccgtttaacagccgtcttgataagtccaagcttgttgaaaatggatttgctccacttccgacctggcaggatgcagttgcacgatatttaaaagaaattgaattttaataaagaacatgaaatgggatggagttttgtggctccatcccatacttcatagcttataatcccttgcgcatctttctaacccgtcaatcacactactaaattccacaccatactttcttgctttgctgcagtccatccacaaattgtgtcttgcgggtgcgtccttgacgataagcctttttccaagcatatcaacaaacttatttgtcacctcatatattgactgtgttgtttcgctaccaaaattatacgcaccgcctggaagtaaaattaccttgtccatattttcagcaacttcctttaaataagtaatgccacgaaattgctttgagctgaaagaaacactatcttgtgtatgaattgcatttaatatcatcatcaaatagttggatcttttttcataataatcatacatccactctgctcttaacatgactgccgacggcagaatatcaagcacacgtttttccatctcaagcttatgagcagcgtagatatttcctggcttcacattttcttctgtatatggtccacaatcctcacaagcactatacacctgatctgagctaaagcatatcagctttctattattatctttacacgcattcgcaagatacataggaatctgcacatttgcaaagtacgatgcttctggatctgcctcgcaagtacctatatcagaaattgctgctgtgtggacaacaacatcagcattgctttctttaatcatacgattcacaatttcctgtgtcacgttccgaagagacggtgacgctgctgtatccttgcatagttccatgagcttatgcccaacaaatccatttgcccctgtaattaaaatcattttcctctccctgatatttaagctgtaactgctaaaagcagcgttccggccgtaataagtaaaacaccgactgccgatttctttgtcagtttttcgtgaaatacaatccacgagaatgcaatcgttaccaacatactaagcttatcaatcggcactactacacttgctggtccttcttgtaacgcccgataataaaagagccacgacgctccagttgccagccctgacaaacaaataaagcataattctttcttctctatcttatttatttctttctgtttttgtgtaacaaacaccatgagccatgccataagcagcactactgtggtgcggattgctgtgccgagattagaatcaataccttcaattccaatcttccccaaaatagaagtcagacttgcaaatactgctgacagcaccgcatagatcagccatcctccactctttttttcagaatccgtttttatgtcttttttggtaatcatcatcatggttcctattccaataagcagcacaaatattatttttttcccagaaataccttcatgaaggaaaatgaatgccagaagaatagacaacacggtacttgatttatcaatgggaacaaccttgttgatatcccctttttgaagggcatgaaaatagcataaccacgatgcacctgtagctaatcctgataaaatcagaaatagaagcgtcctgccgtcaatctgtcttattcctccccatgttcctgtaatcaataccatgagccatgaaaacaacaatacaactacagttcgtattgctgttgccacattcgaatctgtctttttaattccgcattttgcaaggatcgctgttattcctgcaaaaaatgaagatcctattgcataaaatatccacatttccttaatcccccttctgctaaggttattggagttaaaagccactctttatttgcctcattatactgtttttcaccacgcatgtccaccagtttttgtaaagctttttgtgttccaaaaagcgaaactgtcttcggcagagaaaaagtctccttatctgaatttttcttgcttgacattttgattatacttcatagtcaaacatataaaaattcaaaataaggaaactattgattctggttacgacttaaaacctatttattgcattcactgccagtgtatatctttctacctttttcactatctgatgtctttcactaatatcgccatcaattcattcacgtcgattggctttgctatatgaccattcatcccagatgcaatagcctctctcttatcttcttcaaaggcacttgctgtcattgcaatgataggtatacatgccttatctttatctggcaggtgtctaatttcttgtgttgctttatagccatccattttaggcatctgaatatccattgaatgtatagtcacaaaagccaaagagacagtaaaattgccattgtacctgtccctctggttcaccaaactgcaaaaaggcagcctgatagcacagcggcttcttaaaaattcatattgatttttctgtccgtcgtgctataatcggtatataccgaaaacaaaggaggatgtacccatgccaagaccgccacggtgccgtcgtatttgtgacgcaccacaagtcgataccttctaccccaacggatgtggagatagtgagccgatcctgctgacgctcgacgagtacgaagtcattcggttagttgacttggagcaacaaacccatgagcagtgtgctgtgcagatggatatttcccgttctaccgtgcaggagatttacgaaagcgcacggcgcaagatcgcagcgtgtcttgtccacaggaagccgctgcacatcaccggaggaaactatcgcatttgcggagggcaggaggcagcccattgcggccgtttctgccggattcagagaaccaacacagaaaaatccaataaaaattgtaaaggagattccattatgaaaattgcagttacctatgaaaacggt

SEQ ID NO: 1169 - DNA, 8668 bp, unidentified
  source 1..8668: mol_type = unassigned DNA
ttaaaagccggtaggcggcacatagtaactggggatcgaggctgttttctgcacatttgcctgctggcgcagcgctgaacgggtcacctctgcccaagaatactgggtcatatactcgccgcgataggaattggtggccgagcggctgccccgcaggaaattgtaataatcacaatccaccttgctggtgtccagcgccagtgtgctgcggccgcggatgagcaggccggtaacacctgcatcctccagcgtatggctcaggtcaaagatcagattgcggagatggctgtgcagcgatgcggtgtcgggcttatcctcccacagcacggccagcatttcgccgttggtgcaggtggcaccattgcgatccaccagataggccagcagctccttgctcttgctgcgcttgaaggccaaagcgcgcccgcccacgaagatctcaaaattgccaaagcactggatcttgatgccgacaggggcattctccggcgggtagcgcagatgctccagcacattgcgcacatctgcctcgtttgcaggcttgagtaaaaagccgctcacgaagatctgcagcgcttccagcgcatactccgggtgctctgttaccacaatgatgttgcagcgcggctgcagcttctggatcatgcgcgtcaaagcaagcccgttcatgccgggcatttccagattgaggaaagccgcgtccatcggcccctgacgcatccagctcagtgcatcctcggtcgtcatggcgctgatatagtcacagtcgggtgcaacgcggcacaggatgcggatcagcgagttgattgcaagctgtccatcatcgacgaccagtatcttcattcgtacacccccgcaagtttaccatacatgttccctgtttcagtttaacactttgtcctttgattcgcaagtttttttgcacaaaaagccagaagctccacacttctttacaaaaggacgttccttccccatccgtttcctcacgaagcagctggctgaaagaggcatctttcccattttcatttccggcagtcaaagcaactatacaagatactctgtgccatccagtccggtcagtttttgtgctgttgtttgtcccacacgggtgcagagccgctcatacgcctgccgcatccgggtagggcgcgaggtgcaattgtgcgcatccgaagagaccgcgtccaccagcccggtcttgacccagtgctccagccgcatccgctgccagaagccgctgtccagcacagccgaacagttgatctggcagcgcagccggtactgtttgtgcaggcgggccagcaggccgtgctgtgcaaggcagggataccgctcaatgtgggccaccagaatgcggtaacccgcacccgtgatctcctgcagagccgtttccagctcctttgccgttatgttcggcacaaattccagcagcacccagccggtatctcccaaggtcagcagctggcgctggactgccgcatatcccgtcgcaggggtatacagcaactcagagccgtgctccagcttcaggtcgtagcctttttgtgtgcagtatgcgcgggccagcgccagatgccggtcatagacttcctgcgggaagtgttccatgcccggcgtactgtgcgaggtagcaaacaggtgccgcacaccgtctgctgccgctgcatccagcatggcatacatttcttctctggtctgcgcaccatcgtccacgccgtagacgaagtgcgcatgataatccgtaaagccgctcatttcttttccgcttcgtggctccgtttataatactttctgtaataaccgtactttccatactttgagtaggatttgtagtacttgcggcccatatagttgtcgtagtccacctgattgagcacggtgcccagaatggggcagccggtctgctcgatctgctgcttcacgtccagcagctcctgacggctcacatcgttgtagttcactgcgatcagggtgccgtcacatgccttggcgatctccgccgcatcgatgaccacgcccaccgggggtgcgtccacaatgacgtaatctgccattctggccagcatatccagcagttcggcaaaatggctgttggtcagcagcgccagcgggttgggcacatcgcggcccaccggcaccatgatcgcgttggggatgtcggtctggtagatgacctcatccatgcccaccataccggccagaaaatgggagaggcccttaccgtcgttgcggccatcctcatatttcaggccgtagtcactgttgaccaagctgcggcgcaggtctgcgtccaccagcgccaccttgatgccgcgctgtgccagcgtgcgcatcaggttcatggacagatagctcttgccctctgcagcatggcagctggtgatcatgatctttttgacactcgcacctgcaaaggagaggttggtgctcagggtattaaaggcttcatttcccgcataatccagagccggaaattttgtgatcttcagctgtttcatgctttcctcccagagctgccgcccacacggcggcggacatcattggcaaaccgcttggtgcggcgcttgaactcgcttttctctttcggctgttcgccagcatcggccagcgggatcgatgccagcacgaccatgccggtatacttgcggatatcatcggcagacttgtaggtatcgtccagcatggtccgcagcaccaccacggcgcaggccagcacaaagcccactacaaagcccagcaggatgttcttggccttgttggggctgaacgggttctccggcacacgcgcagaagacatcagggtgggctcgtccgtcttcatcttttccgagatgtactttgcgcccacatccgcatacttgtttgcgatcgctgctgcttcttccgggtccgggttcgtgaccgtgatatccagcatacgggtgtcgctggtgttggtgacagacagcatactggccatatcggtgtaggtgtaatccagatccaggttgctgatgaccttttcgtggacttcccacatttcaaagaccttgatgtaatcgctggtcagctcgctgccgacctgcagatcggagaagttcagcaccgaatcattgcggctgaccacataaatggtggccgttgccttgtacatcggcgttaccagaaaaaacgtataaagcgccatcagtacggcacccaccacagccgtggctgcaatgagcgtccagtgggccagcaggcccatgaacagttccagcagatcaatggtatcttcgtcctgttccggctgtgccgctaaagctgtgcgctccttcataaaagtatcttgctgcacgatttcactccttataaccttataatactgccgcccatgcggcccgggcattgcgccctttcctctgtttttctgaatcctatacgccaaaaatgcggcgttccctttttcatcagggagcaccgcagaacatttctagttcttagccctcaatggtcttcacggccaccagaacgaagttggaaccatagagcttgacctgacggcccttcaggttcaccacgatcttgccatccacgaccttaccgggcacagtatagtaggtataggtcacagtgccgtctgccttcgtcttgggcacagccaccagaacggtaacttgctcgttgtcctcgtaagcagcctcaatgaccttggactcaatggtcagcttaacatttgcagcgtcgagcaggttagaggtctgcatctcaaaggcctgcgttacagtaacatctatagtcgtcttcttttctttcgaagcgcccgcagccttctgcaggtctgcatcagaagtgatgtcctgcaggacttcctcgacctgagcggtatcctccttggcagtgaccttcacatcgctgacaatgcccagaacaccggtgacggtagcagaaccgctggccttgacctcatctgccacagtcttgctgggcgttgctgccagaacagacacacccatgcccacgaccatagcagcggtcagaacagcgctgataactttcttcataatgaagatctcctttcacttcaagccgcactccccaagatgctgctttctatcgcaaatgcttttcaacatttacatcattcttcaacaggctcccagaacagcgtcagaaccgctttctggatggaagcttcggtcggatagaactcggtgaatccgtcctctgccaccttgtgttcgccttccagtgcaatggcaggttccacagtatcgtcctttgcggcccacacctcattgaccagctgaccctttgcaaggtcggtgaccagataaggctgcagcgcatcgtacacctgtgcggtgaactgctgatcctgctgcaccctgctttccagctgtgcggaaagctgtgcaagatactcctcctgccgcaccatgcgggcttcgttggtgccttcgccaatatccatgcgcctgcgcacaaaaatctcagcctgatcgccctgcagcgtcagggtagctcccttggtcatggccgggtctgctgcggagaaatcatcctccagcgtcacggtcacaccgcctgcaaggtcgttcagcaccgagatgccgtccagactcatagccagatagaaatcaatgttttccccctgcatcaggcgggacactgcatcacgggcatagccgcagctttcctccttgccatcgccaaagccatgggcaaggctgatctgcatctgagtggtgcccaccggattgcccagcatgccaagcaccgtcacctctgccatggtgtcgcggtcgatcttgagctgacggaccgtcttgtctttgctgtctatcacaatgagccgctgaaaatccgcctgaccgccctgataagagccttctgcttccacctcgctgtcatggtcgatgcccataacaaggatggtggtcagatctgtgcgcctgcggtaggtcacgccgtccacttccatggtctcagcggtctcctgcggcagctccgtccgggtctccggcttttggctgcgcttttccagccagcttccgcccacaaaaaacagtacagctgccagcaccagcacagccagcgcagcagcggcaccacgatgttgtttttgtctgttcaagcgggtaagcttccctcttttcttcggaatatagttttctgcgggaaggtctttccattgccacagaaagatattccttggcctattatatcgtcacaggtgtgcaactgtcaatgtattttcgttattttccggcaggaaatttcgcattttcagcctttagggagccacagataaacacaaaccccggccatgcagagttcatccgcacagccggggccaattggtattttatttgatatccagttcaggcggcacatcgatctggtccgagacatacttgccgttctttttgcgctgccgcacgcactccgtcagcagatattcgatctgcccgttcaccgagcggaagtcatcttcggcccaggcggcaagggcatcgtagagcttcgcgttcaggcgcaggggcacctgcttttttggttctgccatcagtacaggctgccgctgttcacgatgggctgggcatcacggttgccgcacagcaccaccagcaggttggagaccattgccgccttgcgctcgtcgtccagctccactaccttgttctcattcaggcgttcaagggccatttccaccatgcccacagcaccgtccacgatcatcttgcgggcatcgatgatggcacttgcctgctggcgctgcagcatcacggctgcgatctccggcgcataggccagataggtgatgcgggcttccactacctcgatgccggcctcggctacattcttctggatctcgtcccggatgcgggcggctaccacctccgaggagccgcgcagactgccctcatcggctacgccgtcgccggtggtgtccacattgggagccacatcataggggtaaacgcgcaccacattgcgcagagcgctgtcgcactgcagggagaggtactccttgtagttgtccacattgaatacggcctttgcggtatcggtcacgcgccagatgaccgcaatgccgatctccaccgggttgcccagacaatcgttgatcttctggcgggagttattgagggtcatcattttgagcgagatcttcttgctggtcgattctgcggtctggggactgctgttgcctgccttaagcagggccgccatgccggtttcgccgctgttcacatcgccgctctggctcagtttggtgccagctgccgggttcaccgcggtgcagaaggggttcacccagtaaaacccctgtcccttcagggtgccgatgtaatcgccgaacagggtgagcaccagtgcttcctggggctttaacaccttcaggccgcagagcaggaagatgcccgccacccagtatgcgatggacaggatcgtgagcaggatgcccggaaacaggctttcgtccagcagaatgatgctgtagaaaaacagcaggacggtaacagcatagcccagcagggtgagcagcagcatgaccatgccgttctttttggtctgcagaattttctcttccataacagttccctccttcacagggtgcggaagcgtttctttatgatatcaaaataatatcactttatatcattcttgtcaagtcctccgcaggcaaaaaagagccgccgcacaaacactgtgcagcagctcctttttgtttatctttttataatgtaaggggcacttgctctcaggcgaaggtcagcaccaccttgccagcgccgctgttacggtctgcaagggtatcgaatgccttctggaagtcctctgccttgaacacatgcgtggtgatctcatcgacctctttcaggtggtcaggcaggatcttgaccacctcggggaacttctggtactgatgacgggtacccagaatggtcagttcctttgcgttgatctccttgaagttcacggggatcggctccttgccaaaggtcatagccaccagacggcctgcgggagaaagctggctggttgcatgtgccagcagtgcgggaacgcctgcggcctcaaagatcacgttgacaccctcgccgtcggtcagtttgttgatgaacgcatccagatcttccttcatcgggttgatgctgtaatctgcgccaaagtcctttgccatggcaaggcggctctcgttcggctcagacacgatcacggtagcgccgcgcgattttgcaatgttggcaacgatcaggccgatggggccgccgccgtgcaccagcaccacatcgccggggcgcacatcgccgcgccagtttgcctgcaggccaatcgtgaacggctcgcacagagcagcctgctgataagtcatcttggaagcatcgtactcatacacctggctgcgcggcatgaccacatattcctgaaaaatgccgtccacgatgcagcccagaaccttcagttcacggcagacattgtggtggccgcagcggcaggcatagcacttgccgcagtaggtgatcggctcaaacacaacacttgcgccgggcttcaggtcggtaacaccctcgcccactgcgatcacctcaccggaaccctcgtggccaagcaccacaggatactttgcatacgggttgctgccatgatagacatgcacatccgagccgcagatgccggcagcgtgcaccttgacgagcacctgattcggctccttgatctcaggcatagggcgctccaccagctgcatatcaccagggccatttacaacaattgctttcataatcatgttcccctttccaaagcttcagatacccgggcaggacaggaatccgccatccacggcaatgacctggcctgtgatgtagccagacatttccggatcagcaaagaaccgcagtgcacccaccagttccttcgggtcgccaaggcggcccatcggggtgcggtggatcacgttccagtagcgctgggtgtaggaaccatccgggttcacatacatgtcatggttcagcggcgtgaggaagtagccgggtgcgaccgcattcacacgcaccttgcctgccgtgttggacaggtagttggacagccacttggtaaacatatccacagcggccttgctgcttgcgtatgcaggcaccatgctcagtgcatcgtaggctgccatggaggtaatgttgatgatggagcagccatcgcggcccaccatgttcactgcaaacacctgacatgccatcacggtgcccagccagttcacatccatgacgcgcagcagcttatcgctgtcgatgttgaacagggtacgggacgaagccagaacgcgggccttttccgcggccagatctgctgcctgcggatctaccttgacgacctctgttgccttttcgtcgcctgcggcataagcttccgaggtggtttttgccagcgggtcctgaatgcctgcgcagttgatcagcacttcatagctgccaaagtgctgcaccacagcatcgcgggccttttccagcgaagctttgtccgtaacatccacctggaatgctgcggcatcgccgccagcctgttcgatctcgcaggccaccttctggcctgcttgaatgttaaaatcaagaatcgctacccggtatccggtctttgcaaactccttggcaaaaatgctgccgaggccgccgccggcaccggtaatcactacagtacggctcat

SEQ ID NO: 1170 - DNA, 8687 bp, unidentified
  source 1..8687: mol_type = unassigned DNA
ttagttcagcagggtcagctcggtctcaggatcgaacaggtggatcttatgcgtatccatagccatggtgaccttgtcgccgcggcgggacttggaggtcggggcaacgcgagccatcaggttctggcccttgtaggtcaggtacagatagatctcagcgcccatcagctcggaaacttcaacctcagtatcgatatggctggaaggatgcttctccaggaactcttcgtcatccttcatatcctcaggacggataccaaccttcaggctcttgccaacgtaagcggccagtttgccatcggcggtcttttcctgcggcagggggatcacggtgccgtccagatcgacgacataggtatcgccattcttctgcagggtgccgtccaggaagttcatctgggggctgccgatgaagccggcaacgaagatgttgcaggggtaatcgtacaggttctgcggagtatcgacctgctggatgacgccatcacgcataacaacgatgcggtcgcccatggtcatagcttcggtctggtcatgggtaacatagatgaaggtggtagccagcttcttgtgcagcttgatgatctcggtacgcatgctggtacgcagcttggcatccaggttggacagaggctcgtcgagcaggaagaccgccgggttacggaccattgcacggcccagggcaacacgctgacgctgaccaccggacagagccttcggcttacggtcaagcaggtgctcgatctccaagatcttggcagcctcacggacgcgcttgtcgatctcgtccttgggcatcttgcgcagctccagaccgaaggccatgttcttgtaaacggtcatgtgcgggtacagagcgtagttctggaagaccatcgcgatgtcgcggtccttcgggggaacgtcgttgatcagacggtcaccgatgtacatctcgccgccggagatctcctccagaccggcaatcatacgcagggtggtggacttaccgcagccggaaggaccgacgaaaacgataaattccttatccgcgatttccaggttgaaatcgggaacggcagtaacattgccggggtaaactttcttaacgtgacggcagctaatggaagccataatgctcatcctccaaatgtattcagtggtttcagcccgtgtagagggggctgtttctgttgacatgattataataacaggttataatctatttgaaaatagcattttattgatatagaggtgtcgaaattgatatttgacccggaaatttactgcaccgctgccgaaacggcggaattggacggcacagcgccgctggcgctggccggagacggcctgtgggtgggggtgctttcccgcggggcgtgcctgctggacggcgttgaccgcccgggccaaagcggcgatattctgctgggccctgcccccctggtgctgacgccgcagagcgactgccatctgctggccgtgcggctgaccggccactgcacggacgcctacttattgcaactgggggcggcgcgctgggcggacggtgctgcctgccccggcgcggcggagctgatcgcacagctgtgcggcgcgcagacggcccccatggcctacgcgctgctctgcgccgcagccaaggccgacgagaccgcccgtcccctgccgccgcttgtggccgaggccgtggcggccatccgccagaattatatggcgctctacggcgtcgaggagctgagcgagcagctcggcgtgacaaaaagccatctggtgcgcgtctttaagcaggagatgggggtgccgccgggcaagtacatgacgaatgtgcgcatcgaggcggtcaagacgctgctgctgaccgatgagtacaatctggacatgatcgcgggcctgacggggttttcgggggccaattatctgtgccgcgtctttaagcgggaggtgggcctctcccccgcggcttggcgcaccgccgccgcacccctgcccgccgtacccaagctcccgccgagaagtcaggagatgtatgtgtaaaagaaaggcttcccccttgggggaagctgtcagcggccccgcccgctgactgatgaggggcaaccttgccattgcaacccgtttacgggcagctgtggcagacccgtccctcatccggcctcggtcggggcctcggccaccttcccccgagggggaaggcatacaaaacaaatgcccgatacggctcgtcaccgcatcgggcattcttaactttatgcagctttattccgcagtcttatacccgtccgggttgtggctctgccagttccagctgtgggcgcacatttcctcaatgccgtactgggcctcccagccgagctcacgcttggccttggagggatcgcaccagcactcggcgatgtcgccggggcggcgcgggtcgatgacataggggatctccttgccgcaggccttgctgaaggcgttgatgacgtccagcacgctgtagccgtggccggtgcccaagttgcagatgaacaggccgggcttctgctccaactttttgatggcagcaacatggccgcgggccaggtcgacaacatgaatgtagtcgcgcacgccggtgccgtcgggggtcgggtagtcattgccaaagacgtggaccttctccagcttgccgacagcgaccttggcgatgtagggcacgaggttgttggggatgccgttggggtcctcgccgatcaggccggacggatgcgcgccgatggggttgaagtaacgaagcagcgcaacgttcagctcggggtcggcgtggcagcagtcagtcaggatgcgctcggtgaacaccttcgtggtgccgtaggggttcgtggtgccgccgacggggaaatcctcgcggatgggcacgctggcggggtcgccgtagaccgtggcggaggaggagaagatgatgttgtggcagttgtggcggcgcatgacatccagaatgttcagcgtgcaggccagattgttggagtagtactcgatgggcttggaaacgctctcgccgacggccttgtaggcggcgaactggatgacacagtcaatgtcctcgttctcggcaaagatcttctccacggcgtccttgtcggtcatgtcggcctcgacaaaacggaagtccttgccggcaatcttcttgacgcgggcaagggcctcggggcaggagttgtagtagttatcggctacaacgatgtcgtaccctgcggccagaagttccacacaggtgtggctgccgatgtagccggcgccaccgctaaccagaattgccataacagtcgtctccttatgttatatgatattgttgcgtgcgaaccgagcggctcgcctctctttgcttgtattctactctttctgcggagtttctgcaataggagtttttgattctgatttgcctttttgttgcctgttttgccgccgtgcgggcagcccctgctgaatgcggcggtaggcggacggcgtgtgccccgtggcagcgcggaatttctggctgaaatacgcgccggagcagtagcccatctgcgcggcgacctcgccgggggatgccccgcgggccagcagctgggccgcgtactcgatgcgcatggcggaaaattcctccatggccgtgcggtggagccgcgctcggaacgcctgctgcagctggggccgcgtgcagcccagcgccgtgcagatgtcgtcgatcttcagttcatgcgcaagattttcggcaaaataggcgcgggcgtcctcgaccagcgcgttctggcggcgctcccgccggacgcgggccacggggcgcttggtgcggcggcagcggcgggccagcaaaatcagcagattttccagatggatgatgaactgttgcatcgcgccgaagggcagctcctcctttaagacaggccgtccgcccggcacgggggcggcgtcgaacagctcgttggcggcatttgccagccagttcaggtcatgctgctcggcaggctccgtgtgcagcatcgcgccgcggaaacggtccatggccgcgccggtgcagtaaaagtcgatgcgcagcgtctcgggcgggacctcgccgacggtggtcatagcaaagacctcccccggctggtggaacagcagtccgcccgcccgcagcagcacgtggcgggcatcgcagcgttcctcaatggtgccgctgcgcacaaagaccagctgccaggcctgcgtctcgctgggcgggaatgagtcgtccgcgcgccactccgacgcatgtgccgccggaatcgcttcgacccgcagcggaaaggtatcgttcagcatgggtgtgacctcccttctggggcgagtgcccgaaggcgtgtagggaggggtcttgacccctccgcggggcgtcgaggacgccgccccctacaaaacctggcgcaaacttgctgtagcttgtagggaaggcatttatgcctcccgtgcactgggcggctggcgcaaagctcccgggagggataaatccctcccctacaacaatttacaccgctaccgcgcccggccaattctcgccggcctccgcactccccgtttccccgtcggctccgtaagagaaaacgccgggggtcatgtcggccagcagggggaactgcgcaagctcggggcaggtgtcggtcagccccagacagtaggccgtcagcggactgatctcctttgtgatggcgtcaaaccggcttgagccgtcgtcctcgtaggtgctcagcataatatcgccggggtaggtgtcggccacatagctgacaagtgcctcgtcgacgtaagggtcgctgctgccctcatacaggtcgggcgcgccgaacagatgcaggatctcgtgggcgtaggtcgccggggactccgcctcgccgtcggtgtaggcgtcggttttgtacaggcagctgtattcataataaaagctgtcgccgtcgtcggcgtagtgagccatcgtgaaggatgtcccgctgatgggcaggaagaacaaaaacgcgatgtgccgggccccgtaggcagccagacggctgtcggcggccagcgacgcgcacagcgtatccatctcgtcgagaaaagcggagctttcctcggaattttcgccgccctgcatggcggactgcacaagataactgcgtgtcagcgttgaatcgctgccgtccgcgctgcgatcacagatcagattcaccgcggcctcgtagcccgcggcctgctcggtgatccagtccacggccagctgggtgcgctgcacggcggcagcgcggctctcggcgtcccaggtctgcccgtgggcggcgtcgttcaaaaacacgttgacgagcacggtggcatcggtcagcagtgcggcgctgccgtaggccttctgctcctcggtaaaggtgggcaccggctccggcgtcggggtggcggcggggctttcggcccggggcagctctgcgggataacgctgcaccgtgacgcgggccgagcagctgcacagcagcgccgcggccagcaccagggcagccagttttctgtacatggtgcgccccttaaatgtccagcacggcactgccgtcgtggtcggccagctccagcgtgacctcgcggccatccaggcggccatcgacgagcgcgtcggagacgggatcctcaatggtcttgcggatcgtgcggcgcagctcacgcgcaccgtatttggtggagctttcggctacgatgtccgccagcgcgggctgcgtgtagtgcagcgtgatgccgtgcgcggccaggccgggcttgtactcgtcgagcatgagcgcggcgatcttctcaaggtcttcctcgctcagcggcttgaacgtaatgatctcgtccacacggccgatgaactcggggcgcaagaactcctgcagcgccttcatgctgcggtccgcgctggcgacctcggcctttttgccgaagcccgtcgcgccgctctggtcggtggagcccgcgttggaggtcatgcagatgaccgtgttcgagaagtccaccgtgcggccctgcgcgtcgttgatcttgccctcgtccagaatctgcagcaagatattcataacgtcaggatgtgctttttcgatctcgtcgaacagcacgacgctgtagggatggcggcggaccttctcggtcagctgcccggcctcgtcgtagccgacatagcccgggggcgagccgatgaggcgggacaccgcgtacttttccatgtactcgctcatgtcgatggagatgagcgggtcaacggtgtcgaacagctggctggccagctgcttgaccagctcggtcttgccgacgccggtggggccgacgaagataaagctggccgggcggtgacgaccagacaggtcggcgcgggcgcgcttgatggccccggccacggcgtggacagcctcgtcctggccgatgatgtgcgccttgagggcatcctccagcccctgcaggcggccatactcggtctctttgatcttcacagcaggtacaccggtccaaagctcaatgacctgtgcgacgtcgtccatggtcacttcaatttccgcgaccttcagctgcagggcgggcagcttttcgcgctgcttcgccagatcggtcttgaccgcggccagtgcctcgtagtcgatggcagcgtcctggccgttctgcggctcggggttctccagttcgtgctcgcgggtctccaaatcggccacggtgcgctgggtctccatgagctctgtaatttcaggatggcgcaggttgcagcaggcgcaggattcatccagcaggtcaatggccttgtccggcaggaaacggtccgtgatgtagcgttccgacagcttgacgatgctcgtcacgatggggtcggacacacggacgcagtggtgcttttcatagtagacgcggatgcccttgatgacttcgatggtgtccagcagcgacggttcctcgaccttgacgggctgaaaacggcgctccaacgcggaatccttctcgatatacttgcgatactcggcaaacgtcgttgcgccgatgacctgcatctgcccgcgggacagcgcgggcttcatgatgttggcggcgttcatagagccgtcggagtcgcccgcgccgacgatggagtggatctcatcaataaacaggatgatgttgcccgcagccttgacctcgctgatgaggcccttgacacgctgctcaaactggccgcggaactgggtgcctgcgacgagggacgtcatgtcgagcaggtaaatttccttgtcctgcagacgcgcggggaccttgccctcggcaatgcgctgggcgatgccctcggcaatcgcagtcttgccgacaccggcctcgccgatcaggcaggggttgttcttctggcggcggcacaaaatctggatcgtgcggtaaatttcgcggtcacggccaatgatgcggtccgtcttgccgtcgcgggccttctgggtcaggttctcgcagtaggtctcaaggaacttgcggcggggagccttttccttcttgccgtttttgggcttggtgtcgtccttattctggcgcgcaccaaagccaaacgggaacacggggctgccgcccgggacaaaatcgtcctgcggggcgggctcgtcaccggcgtcggtgtcgtcgccgttcatcatgggggccagcatgccggagtcggaggcctcctgcaaaaagctggacatccgctcctccatgttttccagatcctggtcggacatgccgaactgtttcatcagatcatccacaggctggatgtgcatggcacgggcgcaggtcaggcagtagccctcctgcacggtcttgccgttttcaagccgctgcacaaacacgacagcgggacgtttttggcatttaacacaaagcatttacttcacctctatgaaaagtgcccgataagaggcacatgggattgcgataaattgttgtagggggcggcgttctcgacgcccggcgggcggataggaaatccgccctacgtagggcgggcagtcccctgcccgccgcaccgtagctacactactattattaaacaaaccctgccaaattgcaagttttggcggggcttgttcagaatttgtttaataatggagcaaaaacgggttgaacgcaccaaaaaggctgtacccgacgctgcgctgcaaaacgccggtggtcagccagtcgatctggccggtggtgatgctggcggcgaaccagagcagcagcgccagcagccagcagtcgaacgcgccggtcacaaggcccagcaccagacccagcagccggttggcgccgcccaccagcgggataagattgacgccgcgcagcagccgcaccagcagggcgaacacccagcgcacgatcatgcagagcagcacaaacagcaccgcctgcaccagcggcaggaaaagcggctccagcagggcgttgatcttttcgggcagctggtccccggcagtctgcagacccgcggccagcgcggcacggatggattccggcagaaagtccagcccctgcaccgcagcggcaatatcgccgcccgactgtgcgacggcctgttcgacccgggtggagacggagtcgctgaaaaagctaaggtagacttccggggccagcgtgcggctgccccaggaggcaatgccgacgcccagcaccgcgccgatcagctcggtcagcccggcgagaaagcccttctgccagcttttgacagcggcaaaggaaaatacggccagaaaaataaaatcatagacaagtgagggagaaaaagacat

SEQ ID NO: 1171 - DNA, 5527 bp, unidentified
  source 1..5527: mol_type = unassigned DNA
atgggaaccgttttcaataaaaaggagcttttggtcctcttgcaggattttcactgccttacggggctgcgctccgccgtttttgattcgtatggaatcgaagtgcttgcctatccgccggaactgccagcttattgccgcttgatccgcagtgtgcctgatggcaagaccggctgttacctgtgtgaccaggcggcttgccgcaaggcaacgcggcaaaagcagacgatcatctacccctgccatgcggggttgatcgaagtgatcacgccggtccaaatcgatggtgctgttgtgggctttttgctgttgagccacattgtacagggggccgatgagcagagcgagtggagctatgcgcaaaaatgctgctcggcttacgcaattgataaaacggcactgcaaaaagcctataatgccttgccgcgcacgccctatccggtgctgaaatcagcagcggatctgctggctttggcggcggctgcattgtaccaaaagggactgacgcggctggcagcgggcagtgcgcaggaaaaactgagccactacctggcgaaacatctggatgagacattgacaaacgaaacgatctgccgtgatctttcgttaagccgtaccgggctgtactatctttcccggcagctctatggctgcggcatcaacgagcaaatcacgcatctgcgcatccaaaaagcgatgaagcttctttgcgatacgaatctgtccaatgcacagatctgccagcagatcggattcctggatgacaattacttttatcgtgttttccgtaaacaaaccggtctgacaccacgccagtaccgtgattctatcttagcagatacatcaaagactgagtagagacgattgttttcaatactggattattgttcaaacaattctgatggaagcggcaatgttgaattgtggccggtgacgtgctataataaacctacatacggtaagccggcacggcgtaattttgaccgctgccttacggaaaattcgcagctgcggagtataactgttatgaaaaaatataagatcgcggtggccgggaccggctatgtggggctttcgattgccacgctgctttcccagcaccatcatgtgacggcggtggatatcctgccggaaaaggtcgcattgatcaacgcgcgcaaatcgccgatccgggacgattacatcgagaaatatctggctgagaaggagctggatctgaccgccacactggacgcaaaggcagcctacgccgatgcggactttgtggtcattgctgcacccaccaactacgacagccagacccagcactttgacacctctgcagtggaggcagtcatccgccttgtcacggaggtcaatccaaacgccctcatggtcatcaaatcgacgattcccgtgggctacacggtgtcggtgcgggaaaggctcggcagccggaacatcctgttcagcccggaatttctgcgagagtccaaggccctgtatgacaacctctacccgtcccgcatcatcgtcggcaccgatccgaaggatgcgcaccttgtcgcagccgcccacgaatttgcggcactgctgcaggaaggtgccatcaaggagaacattgatacgctcttcatgggctttaccgaggccgaagccgtcaagctgttcgccaacacctatctggcgctgcgcgttgcctatttcaatgagctggatacctacgcggagagcaagggcctgaacacgaagcagatcattgacggcgtatgtcttgacccgcgcatcggcagccaatacaataaccccagcttcggctacggcggctactgcctgcccaaggacacgaagcagctgctggcaaactacgccgatgtgccggaaaatctcatcgaggctattgtggagtccaaccgcacccgcaaggacttcatcgctgaccgcgtgctgaagctggccgggtactacggctacgatcaggaaaatgagtttgacgaaagccgcgaaaggcccgtcacgatcggcgtctaccgcctgacgatgaagagcaacagcgacaacttccgccaaagctcgattcagggtgtcatgaagcgcatcaaggccaagggcgcacaggtcatcatctatgagcctacgctggaggacggcaagaccttcttcggttcggcagtggtcaacgatctggacaaattcaagcggcagagtcaggccattctggccaaccgctacgatgcctgcctcgacgatgtgcaggacaaggtctacacaagagatctgttcggcagagactgaaacgcctttcttccgctttttgacagtggagtaaggctctcaatgccattaccgcacaatatccctgtgacttttaaagagaggaacacctgttatatgaaatatgattatctggtagtcggctccggtctgtacggtgccatcttcgcccatgaggccaaggcccacggcaaatccgtgctggtcgtggataagcgccccaacattgcgggcaacatttataccgagaacatcgagggtatcaacgtccataagtatggtgcgcacatcttccacaccaacaacaaaaaggtctggaactatatcacccggtttgccgagttcaaccgctttacgaactctcccgttgccaactataagggtgagctgtattcgctgcccttcaacatgtatacctttaataaaatgtggggcgtcgtcacaccggaggaggcagccgccaaaattgaggagcagcgccgtgagatcacccacgagccgcagaaccttgaggagcaggccatctcccttgtaggccgcgacatttatgagaagctcatcaagggctacaccgaaaagcagtggggccgcgattgcaaggacctgcctgcttttatcatcaagcgcctgcctgtgcggctgacctttgacaacaactatttcaacgcgctgtatcagggcattcccatcggcggctacaccaagatgatcgccaatcttctggacggcatcgaggtgcggctgaacaccgattacctcgaaaacaaggccgcgctggacgcactggctgacaaaatcgtctacaccggcccgattgacgcttattttgactacaaactcggcacgttggagtaccgctccgtccggtttgagaatgagctgctcgacaagcccagcttccagggcaacgccgccgtcaactatacggaccgcgagacgccgtggacccgcatcatcgagcacaaatggttcgagttcggcaaggacgagaacggcaacgacctgcccaaaacgatcatcagccgcgagtattcctctgagtggaagcccggtgacgagccgtattaccccgtcaacgatgctaaaaacggcgcgctgtatgccgagtacaagaagctggccgacgccgagccgaaggtcatcttcggcggacgcctgggtgagtacaagtattacgacatggatcaggttatcgccgccgtgctggaccgctgcgaaagcgagctgcactaaagtacagccaagcgaaagcacaaaatccaaaaggcagcaaagcagaccccaaaagctaaaatcggggtttactttgctgcccttttttatttgctcaatccgctggcgccgcttgccacaacgccgccgtccataagaatgtctgctccggtcaggaagcccagccgctcatccagaagaagcgcaaacaaagcggcgatttcttccggctttccgttgcgcttgagagcggagtgttttttgaatacatccgcctgcccgctttccagtgcgcccatcggcgtgtcaaagttgccgggtgtcacactcaggcaacgcacatttttctcgccaaagcgtgcggcatcggtcttagcaaaccaaattacaaaatgcttgctgatggcgtaggccagacccgggcgggcatccttaggggcaatgcctgcccgcgccaccagctttttgatgaatttttcacggtcggtgcgcgccagcttgtacgcacccttgggcatgacaaactgcggggcaaggtaggcgctcatgctggaggtgtcgatcacacagccgcccggcgccatgacctcataaaaggcatcgttgatattcaccgtacccagcgcattgccgcgcaaaatcttttcagcatcgcccatgtgagggctaaggcccgcaatgtgcaataccgcttttacttcgccgcattcggcggcgtgtttggccagcgcaaaacagctttcacggtcggaaacatcacagctgaacgcctcagcctcgccgcctgcactgcgcagatcgttgactgccttttccagcttggacgccgtgcgccccaccaaaatcgtgtaatatccttcttcacagacgagcttcgccgtggcaagtcccatcccgctgccaccgcctgtgataacgcaaacctttttcataataggcacccccttttctttgtgtcagtgcagggaatccagtgcgtggagatagcactcccactgctggtcattcatttgcataagcttgcagatagattcatacagcttcttcatgcgatttttccctcctgcttgagccatactgcgagatcatgcagtgtttccttgtagggacgcggggcaaagccaagctcattttttgccttggagcagtcaaaatggttgttgcgctccagattgtaaacggcaaactcggtcagcacagcgggcttgccggtcttggccgcgcgggcctccatctgcttggcggcaaaatgcgcaaaagacagcggcagataaaacaggcagccgcggcagccggtatcagccttgagcatctcacacagctccttcagcgaaacctcgtcattggaaaggatgtagcactcgcccttgcgcccgcggtcagcggcggcaatcgtgccagcggccagatcgcgcacatcgacaaggttaaacgaaccctgcataccgatgggcatctcaccgttcaaaatctggatcagcgtgcgggtcgtctgcccgatggcggggtcgttggggccaagaataccgctgggatgcaccacgcaggcattcagcccgtcagcggcggcgtccagcaccttctgggtcgccattgccttgctgcggctgtaccagccgaccacgcgatcatcatcgtagggaacaaagctgtatacctcgcggatgctctcgcccttaggcagctcagggatggcgccggtgctggaaacatagacgaactttttgcactccgggtgatttttagcggcgttcagcatgttttcggttccgcccacattgacggcgatgagcttttcactataattcgggttgatcgtcaccatgctcgcgcagtggatgcagacagtctggacgcccggctccacggcaaagaatttctcgcagtcctcggcattgcagaggtcaccctcaaagatttcgacggccttcggcataaattttacagcggggtcgcccttcagcacaaaagcgcgcacggcatcaccgcgctccaaaagctgtgcgcagacattagtgcccataaatccggcagcaccggtgacaagatagatgattttcat
